(19) United States
(12) Patent Application Publication
(10) Pub. No.: US 2011/0131684 A1
(43) Pub. Date: Jun. 2, 2011

(54) Plants Having Enhanced Yield-Related Traits and a Method for Making the Same

(76) Inventors: Ana Isabel Sanz Molinero, Gentbrugge (BE); Yves Hatzfeld, Lille (FR); Christophe Reuzeau, Tocan Saint Apre (FR)

(21) Appl. No.: 13/003,902

(22) PCT Filed: Jul. 14, 2009
(86) PCT No.: PCT/EP2009/058942

§ 371 Date: Jan. 13, 2011

Related U.S. Application Data
(60) Provisional application No. 61/081,823, filed on Jul. 18, 2008.
(60) Provisional application No. 61/082,239, filed on Jul. 21, 2008.
(60) Provisional application No. 61/084,641, filed on Jul. 30, 2008.
(60) Provisional application No. 61/089,927, filed on Aug. 19, 2008.
(60) Provisional application No. 61/119,809, filed on Dec. 4, 2008.

(30) Foreign Application Priority Data
Jul. 17, 2008 (EP) 08160636.0
Jul. 18, 2008 (EP) 08160752.5
Jul. 30, 2008 (EP) 08161407.5
Aug. 19, 2008 (EP) 08162611.1
Nov. 24, 2008 (EP) 08169818.5

(51) Int. Cl. A01H 1/00; C12N 5/10; C12N 15/63; C07K 14/415; C07H 21/04; A01H 5/10; A01H 5/00

(52) U.S. Cl. 800/290; 435/419; 435/320.1; 530/372; 536/23.6; 800/278; 800/298; 800/320; 800/320.1; 800/320.2; 800/320.3

(57) ABSTRACT

The present invention relates generally to the field of molecular biology and concerns a method for enhancing yield-related traits by modulating expression in a plant of a nucleic acid encoding an MSR (Methionine_Sulfoxide_Reductase). The present invention also concerns plants having modulated expression of a nucleic acid encoding a MSR, which plants have enhanced yield-related relative to corresponding wild type plants or other control plants. The invention also provides constructs useful in the methods of the invention. Furthermore, the present invention relates generally to the field of molecular biology and concerns a method for enhancing yield-related traits by modulating expression in a plant of a nucleic acid encoding an Enolase. The present invention also concerns plants having modulated expression of a nucleic acid encoding an Enolase, which plants have enhanced yield-related traits relative to corresponding wild type plants or other control plants. The invention also provides constructs useful in the methods of the invention. Even furthermore, the present invention relates generally to the field of molecular biology and concerns a method for enhancing various yield-related traits in plants by modulating expression in a plant of a nucleic acid encoding a ZAT-like zinc transporter. The present invention also concerns plants having modulated expression of a nucleic acid encoding a ZAT-like zinc transporter, which plants have enhanced yield-related traits relative to corresponding wild type plants or other control plants. The invention also provides constructs useful in the methods of the invention. Yet furthermore, the present invention relates generally to the field of molecular biology and concerns a method for improving various plant growth characteristics by modulating expression in a plant of a nucleic acid encoding 6-PGDH (6-phosphogluconate dehydrogenase or 6-phosphogluconate dehydrogenase) polypeptide. The present invention also concerns plants having modulated expression of a nucleic acid encoding a 6-PGDH polypeptide, which plants have improved growth characteristics relative to corresponding wild type plants or other control plants. The invention also provides constructs useful in the methods of the invention.

[0001] The present invention relates generally to the field of molecular biology and concerns a method for enhancing yield-related traits by modulating expression in a plant of a nucleic acid encoding an MSR (Methionine_Sulfoxide_Reductase). The present invention also concerns plants having modulated expression of a nucleic acid encoding a MSR, which plants have enhanced yield-related relative to corresponding wild type plants or other control plants. The invention also provides constructs useful in the methods of the invention.

[0002] Furthermore, the present invention relates generally to the field of molecular biology and concerns a method for enhancing yield-related traits by modulating expression in a plant of a nucleic acid encoding an Enolase. The present invention also concerns plants having modulated expression of a nucleic acid encoding an Enolase, which plants have enhanced yield-related traits relative to corresponding wild type plants or other control plants. The invention also provides constructs useful in the methods of the invention.

[0003] Even furthermore, the present invention relates generally to the field of molecular biology and concerns a method for enhancing various yield-related traits in plants by modulating expression in a plant of a nucleic acid encoding a ZAT-like zinc transporter. The present invention also concerns plants having modulated expression of a nucleic acid encoding a ZAT-like zinc transporter, which plants have enhanced yield-related traits relative to corresponding wild type plants or other control plants. The invention also provides constructs useful in the methods of the invention.

[0004] Yet furthermore, the present invention relates generally to the field of molecular biology and concerns a method for improving various plant growth characteristics by modulating expression in a plant of a nucleic acid encoding 6-PGDH (6-phosphogluconate dehydrogenase or 6-phosphogluconate dehydrogenase) polypeptide. The present invention also concerns plants having modulated expression of a nucleic acid encoding a 6-PGDH polypeptide, which plants have improved growth characteristics relative to corresponding wild type plants or other control plants. The invention also provides constructs useful in the methods of the invention.

[0005] The ever-increasing world population and the dwindling supply of arable land available for agriculture fuels research towards increasing the efficiency of agriculture. Conventional means for crop and horticultural improvements utilise selective breeding techniques to identify plants having desirable characteristics. However, such selective breeding techniques have several drawbacks, namely that these techniques are typically labour intensive and result in plants that often contain heterogeneous genetic components that may not always result in the desirable trait being passed on from parent plants. Advances in molecular biology have allowed mankind to modify the germplasm of animals and plants. Genetic engineering of plants entails the isolation and manipulation of genetic material (typically in the form of DNA or RNA) and the subsequent introduction of that genetic material into a plant. Such technology has the capacity to deliver crops or plants having various improved economic, agronomic or horticultural traits.

[0006] A trait of particular economic interest is increased yield. Yield is normally defined as the measurable produce of economic value from a crop. This may be defined in terms of quantity and/or quality. Yield is directly dependent on several factors, for example, the number and size of the organs, plant architecture (for example, the number of branches), seed production, leaf senescence and more. Root development, nutrient uptake, stress tolerance and early vigour may also be important factors in determining yield. Optimizing the above-mentioned factors may therefore contribute to increasing crop yield.

[0007] Seed yield is a particularly important trait, since the seeds of many plants are important for human and animal nutrition. Crops such as corn, rice, wheat, canola and soybean account for over half the total human caloric intake, whether through direct consumption of the seeds themselves or through consumption of meat products raised on processed seeds. They are also a source of sugars, oils and many kinds of metabolites used in industrial processes. Seeds contain an embryo (the source of new shoots and roots) and an endosperm (the source of nutrients for embryo growth during germination and during early growth of seedlings). The development of a seed involves many genes, and requires the transfer of metabolites from the roots, leaves and stems into the growing seed. The endosperm, in particular, assimilates the metabolic precursors of carbohydrates, oils and proteins and synthesizes them into storage macromolecules to fill out the grain.

[0008] Another important trait for many crops is early vigour. Improving early vigour is an important objective of modern rice breeding programs in both temperate and tropical rice cultivars. Long roots are important for proper soil anchorage in water-seeded rice. Where rice is sown directly into flooded fields, and where plants must emerge rapidly through water, longer shoots are associated with vigour. Where drill-seeding is practiced, longer mesocotyls and coleoptiles are important for good seedling emergence. The ability to engineer early vigour into plants would be of great importance in agriculture. For example, poor early vigour has been a limitation to the introduction of maize (Zea mays L.) hybrids based on Corn Belt germplasm in the European Atlantic.

[0009] A further important trait is that of improved abiotic stress tolerance. Abiotic stress is a primary cause of crop loss worldwide, reducing average yields for most major crop plants by more than 50% (Wang et al., Planta (2003) 218: 1-14). Abiotic stresses may be caused by drought, salinity, extremes of temperature, chemical toxicity and oxidative stress. The ability to improve plant tolerance to abiotic stress would be of great economic advantage to farmers worldwide and would allow for the cultivation of crops during adverse conditions and in territories where cultivation of crops may not otherwise be possible.

[0010] Crop yield may therefore be increased by optimising one of the above-mentioned factors.

[0011] Depending on the end use, the modification of certain yield traits may be favoured over others. For example for applications such as forage or wood production, or bio-fuel resource, an increase in the vegetative parts of a plant may be desirable, and for applications such as flour, starch or oil production, an increase in seed parameters may be particularly desirable. Even amongst the seed parameters, some may be favoured over others, depending on the application. Various mechanisms may contribute to increasing seed yield, whether that is in the form of increased seed size or increased seed number.

[0012] One approach to increasing yield (seed yield and/or biomass) in plants may be through modification of the inherent growth mechanisms of a plant, such as the cell cycle or various signalling pathways involved in plant growth or in defense mechanisms.

[0013] Concerning MSR polypeptides, it has now been found that various yield-related traits may be improved in plants by modulating expression in a plant of a nucleic acid encoding an MSR (Methione Sulfoxide Reductase) in a plant.

[0014] Concerning enolase polypeptides, it has now been found that various yield-related traits may be improved in plants by modulating expression in a plant of a nucleic acid encoding an Enolase in a plant.

[0015] Concerning ZAT-like zinc transporter polypeptides, it has now been found that yield-related traits may be enhanced in plants by modulating expression in a plant of a nucleic acid encoding a ZAT-like zinc transporter in a plant.

### BACKGROUND

### 1. Methionine Sulfoxide Reductase (Msr)

[0016] Oxygen is essential to all aerobic organisms but can also have many harmful effects. Oxidation of Methione residues in a protein or a peptide has been implicated in several serious conditions in humans, including adult respiratory distress syndrome, rheumatoid arthritis, smokers' emphysema, and Alzheimer's disease. There is now growing evidence that enzymatic repair of oxidized Methione residues may play a key protective role in organisms ranging from bacteria to humans (El Hassouni Proc Natl Acad Sci USA. 1999; 96:887-892). In addition to being the most common form of oxidative damage to proteins, the oxidation of Methione to Methionine sulfoxide (MetSO) is unique in being readily reversible by the enzyme peptide-Met sulfoxide reductase (MSR; EC 1.8.4.11), suggesting that MSR may be able to repair oxidatively damaged proteins (Brot et al. Anal Biochem. 1982 b; 122:291-294) in vivo.

[0017] The methionine sulfoxide reductase (Msr) family is composed of two monomeric enzymes named MsrA and MsrB, which reduce oxidised methionine residues in a peptide (peptide-L-methionine (S)—S-oxide). MsrA and Msr B display specific stereo-selectivities towards the sulfoxide. Both isoforms contribute and are necessary to protect the cell against the stress caused by the oxidation of Met residues at the sulfur atom which typically present a racemic mixture of the two stereoisomers.

[0018] Additionally, MsrA and MsrB types share the same chemical reaction mechanism which includes three steps with (1) formation of a sulfenic acid intermediate with a concomitant release of 1 mol of methionine per mol of enzyme; (2) formation of an intramonomeric disulfide Msr bond followed by; (3) reduction of the oxidized Msr by thioredoxin (Trx). The active sites of both Msrs are adapted for binding protein-bound methionine sulfoxide (MetSO) more efficiently than free MetSO (Boschi-Muller, et al. Biochim. Biophys. Acta (2005); 1703: 231-238; Boschi-Muller et al. 2008, Arch Biochem Biophys. 15; 474(2):266-73). In a number of bacteria, the MSRA and MSRB domains are fused (Kryukov et al. 2002 PNAS 99:4245-4250).

[0019] In plant cells, several MSR protein isoforms both of the A and B type are present. The isoforms may be localized to different subcellular compartment such as cytosol, chloroplast or secretory pathway. Phylogenetic analysis revealed that the A and B type have evolved such that two MSR-A and MSR-B subgroups can be distinguished. They differ essentially in the number and in the position of the cysteines involved in catalysis and enzyme regeneration, but also in the subcellular localization or in the intron/exon distribution of the gene encoding the isoform. MSR-A and MSR-B isoforms contribute to a total MSR enzymatic activity in plant cells as measured by Sanchez at al. 1983 Plant Physiol 73:619-623; Bechtold et al. 2004, Plant Cell 16:908-919. Functionally, the plant MSRs, A and B type included, appear to constitute key components in preventing damage in proteins under severe environmental constraints known to generate-ROS in plastids (Romero et al. 2004 Plant Physiol 136:3784-3794), or under pathogen infection (Sanchez et al. 1983), but also under more subtle treatments such as long night periods (Bechtold et al. 2004).

2. Enolase (2-phospho-D-glycerate hydrolase)

[0020] Enolase (2-phospho-D-glycerate hydrolase) is an essential glycolytic enzyme that catalyses the interconversion of 2-phosphoglycerate and phosphoenol-pyruvate. Genes encoding Enolase proteins are conserved from prokaryotes to eukaryotes. In vertebrates, isoenzymes alpha, beta and gamma are present: alpha is present in most tissues; beta is localised in muscle tissue; and gamma is found only in nervous tissue. The functional enzyme exists as a dimer of any 2 isoforms: in immature organs and in adult liver, it is usually an alpha homo-dimer; in adult skeletal muscle, a beta homodimer; and in adult neurons, a gamma homodimer; in developing muscle, it is usually an alpha/beta heterodimer; and in the developing nervous system, an alpha/gamma heterodimer. The tissue specific forms display minor kinetic differences. In plants levels of Enolase transcripts and activity reportedly increased in response to abiotic stresses such as salt, low and high temperature, and anaerobic stresses (Forsthoefel, et al. 1995; Plant Physiol. 108(3): 1185-1195). In animal cells, Enolase has also been known to function as a transcription factor that represses the expression of c-myc by binding to the c-myc gene promoter.

[0021] In higher plants, Enolase, like other glycolytic enzymes, is present as multiple isoforms localized to the cytosol and to plastids. In addition to its essential role in glycolysis and gluconeogenesis, in plants, Enolase plays specialized roles in processes with high demand for carbon flux through glycolysis such as fruit ripening (Van Der Straeten et al., 1991; Plant Cell, 3: 719-735) and growth under conditions of anaerobiosis. Exposure of plants to anaerobic stress causes a shift from an oxidative to a fermentative mode of carbohydrate metabolism, resulting in the increased expression of many enzymes of the glycolytic pathway (Lal et al; 1998 Plant Physiol. 1998 December; 118(4):1285-93).

[0022] In animal cells, part of the Enolase protein has been shown to bind to the promoter element of the c-myc gene and to repress c-myc expression (Subramanian et al., 2000; J. Biol. Chem., 275: 5958-5965). Similarly a plant derived Enolase protein, the LOS2 protein, can bind to the c-myc promoter as well as to the promoter of the zinc finger STZ/ZAT10 from Arabidopsis. The characteristic DNA binding and repressor protein domains of Enolases are conserved between the human alpha-Enolase and the Arabidopsis LOS2 Enolase. The LOS2 Enolase protein has been suggested to play a role in controlling gene expression under low temperature stress in Arabidopsis thaliana (Lee et al. 2002; EMBO J. 21(11): 2692-2702). The Arabidopsis thaliana los2 mutant plants reportedly displayed chilling and freezing sensitivity.

3. Zn Transporter of Arabidopsis thaliana (ZAT)

[0023] Van der Zaal et al., (Plant Physiology, March 1999, Vol. 119, pp. 1047-1055) describe a ZAT zinc transporter (the term ZAT being derived from Zn transporter of Arabidopsis thaliana) of 398 amino acid residues and predicted to have six membrane-spanning domains. The authors analyzed transgenic plants containing the Arabidopsis thaliana ZAT coding sequence under the control of the cauliflower mosaic virus 35S promoter. Plants obtained with ZAT in the sense orientation reportedly exhibited enhanced Zn resistance and strongly increased Zn content in the roots under high Zn exposure. Antisense mRNA-producing plants were reported to be viable, with a wild-type level of Zn resistance and content, like plants expressing a truncated coding sequence lacking the C-terminal domain of the protein.

[0024] Ramesh et al., (Plant Molecular Biology 54: 373-385, 2004) describe the effects of over-expression of the Arabidopsis zinc transporter AtZIP1 in Hordeum vulgare cv. Golden Promise on plant growth, seed mineral content and zinc transport rates. The authors reported that in the long-term growth experiments there were no significant differences between transgenic and control lines in leaf zinc content or shoot biomass under zinc-sufficient or zinc-deficient conditions. Root-to-shoot ratios were reported to be higher in the transgenic plants grown under low zinc conditions.

[0025] Since the ZIP-type zinc transporters described in Ramesh et al. did not give any significant differences between transgenic and control lines in leaf zinc content or shoot biomass under zinc-sufficient or zinc-deficient conditions, it was surprising to find that ZAT-like zinc transporters gave enhanced yield-related traits upon modulating expression in a plant of a ZAT-like zinc transporter.

### 4. 6-Phosphogluconate Dehydrogenase (6-PGDH)

[0026] 6-Phosphogluconate dehydrogenase (EC: 1.1.1.44) (6-PGDH) is an oxidative carboxylase that catalyses the decarboxylating reduction of 6-phosphogluconate into ribulose 5-phosphate in the presence of NADP. This enzyme contributes to generate a significant amount of reducing power (NADPH) in the a cell. This reaction is a component of the hexose mono-phosphate shunt and pentose phosphate pathways (PPP) Broedel and Wolf J. Bacteriol. 172 4023-4031 1990. Prokaryotic and eukaryotic 6PGD are proteins of about 470 amino acids whose sequence are highly conserved Adams et al. EMBO J. 2 1009-1014 1983. The protein is a homodimer in which the monomers act independently: each contains a large, mainly alpha-helical domain and a smaller beta-alpha-beta domain, containing a mixed parallel and anti-parallel 6-stranded beta sheet. NADP is bound in a cleft in the small domain, the substrate binding in an adjacent pocket.

### SUMMARY

### 1. Methionine Sulfoxide Reductase (Msr)

[0027] Surprisingly, it has now been found that modulating expression of a nucleic acid encoding an MSR polypeptide gives plants having enhanced yield-related traits relative to control plants.

[0028] According one embodiment, there is provided a method for enhancing yield-related traits relative to control plants, comprising modulating expression of a nucleic acid encoding an MSR polypeptide in a plant.

2. Enolase (2-phospho-D-glycerate hydrolase)

[0029] Surprisingly, it has now been found that modulating expression of a nucleic acid encoding an Enolase polypeptide gives plants having enhanced yield-related traits relative to control plants.

[0030] According one embodiment, there is provided a method for enhancing yield-related traits relative to control plants, comprising modulating expression of a nucleic acid encoding an Enolase polypeptide in a plant.

3. Zn Transporter of Arabidopsis thaliana (ZAT)

[0031] It has now surprisingly been found that modulating expression of a nucleic acid encoding a ZAT-like zinc transporter polypeptide gives plants having enhanced yield-related traits, in particular increased yield relative to control plants.

[0032] According one embodiment, there is provided a method for enhancing plant yield-related traits relative to control plants, comprising modulating expression in a plant of a nucleic acid encoding a ZAT-like zinc transporter polypeptide in a plant.

### 4. 6-Phosphogluconate Dehydrogenase (6-PGDH)

[0033] Surprisingly, it has now been found that modulating expression of a nucleic acid encoding a 6-PGDH (6-phosphogluconate dehydrogenase or 6-phosphogluconate dehydrogenase) polypeptide, gives plants having enhanced yield-related traits relative to control plants.

[0034] According one embodiment, there is provided a method for improving yield related traits of a plant relative to control plants, comprising modulating expression of a nucleic acid encoding a 6-PGDH (6-phosphogluconate dehydrogenase or 6-phosphogluconate dehydrogenase) polypeptide. The improved yield related traits comprised one or more of increased biomass, increased early vigour, and increased seed yield.

### DEFINITIONS

### Polypeptide(s)/Protein(s)

[0035] The terms “polypeptide” and “protein” are used interchangeably herein and refer to amino acids in a polymeric form of any length, linked together by peptide bonds.

### Polynucleotide(s)/Nucleic Acid(s)/Nucleic Acid Sequence(s)/Nucleotide Sequence(s)

[0036] The terms “polynucleotide(s)”, “nucleic acid sequence(s)”, “nucleotide sequence(s)”, “nucleic acid(s)”, “nucleic acid molecule” are used interchangeably herein and refer to nucleotides, either ribonucleotides or deoxyribonucleotides or a combination of both, in a polymeric unbranched form of any length.

### Control Plant(s)

[0037] The choice of suitable control plants is a routine part of an experimental setup and may include corresponding wild type plants or corresponding plants without the gene of interest. The control plant is typically of the same plant species or even of the same variety as the plant to be assessed. The control plant may also be a nullizygote of the plant to be assessed. Nullizygotes are individuals missing the transgene by segregation. A “control plant” as used herein refers not only to whole plants, but also to plant parts, including seeds and seed parts.

Homologue(s) “Homologues” of a protein encompass peptides, oligopeptides, polypeptides, proteins and enzymes having amino acid substitutions, deletions and/or insertions relative to the unmodified protein in question and having similar biological and functional activity as the unmodified protein from which they are derived.

[0038] A deletion refers to removal of one or more amino acids from a protein.

[0039] An insertion refers to one or more amino acid residues being introduced into a predetermined site in a protein. Insertions may comprise N-terminal and/or C-terminal fusions as well as intra-sequence insertions of single or multiple amino acids. Generally, insertions within the amino acid sequence will be smaller than N- or C-terminal fusions, of the order of about 1 to 10 residues. Examples of N- or C-terminal fusion proteins or peptides include the binding domain or activation domain of a transcriptional activator as used in the yeast two-hybrid system, phage coat proteins, (histidine)-6-tag, glutathione S-transferase-tag, protein A, maltose-binding protein, dihydrofolate reductase, Tag·100 epitope, c-myc epitope, FLAG®-epitope, lacZ, CMP (calmodulin-binding peptide), HA epitope, protein C epitope and VSV epitope.

[0040] A substitution refers to replacement of amino acids of the protein with other amino acids having similar properties (such as similar hydrophobicity, hydrophilicity, antigenicity, propensity to form or break α-helical structures or β-sheet structures). Amino acid substitutions are typically of single residues, but may be clustered depending upon functional constraints placed upon the polypeptide; insertions will usually be of the order of about 1 to 10 amino acid residues. The amino acid substitutions are preferably conservative amino acid substitutions. Conservative substitution tables are well known in the art (see for example Creighton (1984) Proteins. W.H. Freeman and Company (Eds) and Table 1 below).

TABLE 1
Examples of conserved amino acid substitutions

| | Conservative | | Conservative |
|---|---|---|---|
| Residue | Substitutions | Residue | Substitutions |
| Ala | Ser | Leu | Ile; Val |
| Arg | Lys | Lys | Arg; Gln |
| Asn | Gln; His | Met | Leu; Ile |
| Asp | Glu | Phe | Met; Leu; Tyr |
| Gln | Asn | Ser | Thr; Gly |
| Cys | Ser | Thr | Ser; Val |
| Glu | Asp | Trp | Tyr |
| Gly | Pro | Tyr | Trp; Phe |
| His | Asn; Gln | Val | Ile; Leu |
| Ile | Leu, Val | | |

[0041] Amino acid substitutions, deletions and/or insertions may readily be made using peptide synthetic techniques well known in the art, such as solid phase peptide synthesis and the like, or by recombinant DNA manipulation. Methods for the manipulation of DNA sequences to produce substitution, insertion or deletion variants of a protein are well known in the art. For example, techniques for making substitution mutations at predetermined sites in DNA are well known to those skilled in the art and include M13 mutagenesis, T7-Gen in vitro mutagenesis (USB, Cleveland, Ohio), QuickChange Site Directed mutagenesis (Stratagene, San Diego, Calif.), PCR-mediated site-directed mutagenesis or other site-directed mutagenesis protocols.

### Derivatives

[0042] “Derivatives” include peptides, oligopeptides, polypeptides which may, compared to the amino acid sequence of the naturally-occurring form of the protein, such as the protein of interest, comprise substitutions of amino acids with non-naturally occurring amino acid residues, or additions of non-naturally occurring amino acid residues. “Derivatives” of a protein also encompass peptides, oligopeptides, polypeptides which comprise naturally occurring altered (glycosylated, acylated, prenylated, phosphorylated, myristoylated, sulphated etc.) or non-naturally altered amino acid residues compared to the amino acid sequence of a naturally-occurring form of the polypeptide. A derivative may also comprise one or more non-amino acid substituents or additions compared to the amino acid sequence from which it is derived, for example a reporter molecule or other ligand, covalently or non-covalently bound to the amino acid sequence, such as a reporter molecule which is bound to facilitate its detection, and non-naturally occurring amino acid residues relative to the amino acid sequence of a naturally-occurring protein. Furthermore, “derivatives” also include fusions of the naturally-occurring form of the protein with tagging peptides such as FLAG, HIS6 or thioredoxin (for a review of tagging peptides, see Terpe, Appl. Microbiol. Biotechnol. 60, 523-533, 2003).

### Orthologue(s)/Paralogue(s)

[0043] Orthologues and paralogues encompass evolutionary concepts used to describe the ancestral relationships of genes. Paralogues are genes within the same species that have originated through duplication of an ancestral gene; orthologues are genes from different organisms that have originated through speciation, and are also derived from a common ancestral gene.

### Domain

[0044] The term “domain” refers to a set of amino acids conserved at specific positions along an alignment of sequences of evolutionarily related proteins. While amino acids at other positions can vary between homologues, amino acids that are highly conserved at specific positions indicate amino acids that are likely essential in the structure, stability or function of a protein. Identified by their high degree of conservation in aligned sequences of a family of protein homologues, they can be used as identifiers to determine if any polypeptide in question belongs to a previously identified polypeptide family.

### Motif/Consensus Sequence/Signature

[0045] The term “motif” or “consensus sequence” or “signature” refers to a short conserved region in the sequence of evolutionarily related proteins. Motifs are frequently highly conserved parts of domains, but may also include only part of the domain, or be located outside of conserved domain (if all of the amino acids of the motif fall outside of a defined domain).

### Hybridisation

[0046] The term “hybridisation” as defined herein is a process wherein substantially homologous complementary nucleotide sequences anneal to each other. The hybridisation process can occur entirely in solution, i.e. both complementary nucleic acids are in solution. The hybridisation process can also occur with one of the complementary nucleic acids immobilised to a matrix such as magnetic beads, Sepharose beads or any other resin. The hybridisation process can furthermore occur with one of the complementary nucleic acids immobilised to a solid support such as a nitro-cellulose or nylon membrane or immobilised by e.g. photolithography to, for example, a siliceous glass support (the latter known as nucleic acid arrays or microarrays or as nucleic acid chips). In order to allow hybridisation to occur, the nucleic acid molecules are generally thermally or chemically denatured to melt a double strand into two single strands and/or to remove hairpins or other secondary structures from single stranded nucleic acids.

[0047] The term “stringency” refers to the conditions under which a hybridisation takes place. The stringency of hybridisation is influenced by conditions such as temperature, salt concentration, ionic strength and hybridisation buffer composition. Generally, low stringency conditions are selected to be about 30° C. lower than the thermal melting point (Tₘ) for the specific sequence at a defined ionic strength and pH. Medium stringency conditions are when the temperature is 20° C. below Tₘ, and high stringency conditions are when the temperature is 10° C. below Tₘ. High stringency hybridisation conditions are typically used for isolating hybridising sequences that have high sequence similarity to the target nucleic acid sequence. However, nucleic acids may deviate in sequence and still encode a substantially identical polypeptide, due to the degeneracy of the genetic code. Therefore medium stringency hybridisation conditions may sometimes be needed to identify such nucleic acid molecules.

[0048] The Tm is the temperature under defined ionic strength and pH, at which 50% of the target sequence hybridises to a perfectly matched probe. The Tₘ, is dependent upon the solution conditions and the base composition and length of the probe. For example, longer sequences hybridise specifically at higher temperatures. The maximum rate of hybridisation is obtained from about 16° C. up to 32° C. below Tₘ. The presence of monovalent cations in the hybridisation solution reduce the electrostatic repulsion between the two nucleic acid strands thereby promoting hybrid formation; this effect is visible for sodium concentrations of up to 0.4M (for higher concentrations, this effect may be ignored). Formamide reduces the melting temperature of DNA-DNA and DNA-RNA duplexes with 0.6 to 0.7° C. for each percent formamide, and addition of 50% formamide allows hybridisation to be performed at 30 to 45° C., though the rate of hybridisation will be lowered. Base pair mismatches reduce the hybridisation rate and the thermal stability of the duplexes. On average and for large probes, the Tm decreases about 1° C. per % base mismatch. The Tm may be calculated using the following equations, depending on the types of hybrids:

1) DNA-DNA hybrids (Meinkoth and Wahl, Anal. Biochem., 138: 267-284, 1984):

Tₘ=81.5° C.+16.6×log₁₀[Na⁺]^{a}+0.41×%[G/C^{b}]−500×[L^{c}]⁻¹−0.61×% formamide

2) DNA-RNA or RNA-RNA hybrids:

Tm=79.8+18.5(log₁₀[Na⁺]^{a})+0.58(%G/C^{b})+11.8(%G/C^{b})²−820/L^{c}

3) oligo-DNA or oligo-RNA^{d} hybrids:

For <20 nucleotides: Tₘ=2(Iₙ)

For 20-35 nucleotides: Tₘ=22+1.46(Iₙ)
[0049] ^{a} or for other monovalent cation, but only accurate in the 0.01-0.4 M range.
[0050] ^{b} only accurate for % GC in the 30% to 75% range.
[0051] ^{c} L=length of duplex in base pairs.
[0052] ^{d} oligo, oligonucleotide; Iₙ,=effective length of primer=2×(no. of G/C)+(no. of A/T).

[0053] Non-specific binding may be controlled using any one of a number of known techniques such as, for example, blocking the membrane with protein containing solutions, additions of heterologous RNA, DNA, and SDS to the hybridisation buffer, and treatment with Rnase. For non-homologous probes, a series of hybridizations may be performed by varying one of (i) progressively lowering the annealing temperature (for example from 68° C. to 42° C.) or (ii) progressively lowering the formamide concentration (for example from 50% to 0%). The skilled artisan is aware of various parameters which may be altered during hybridisation and which will either maintain or change the stringency conditions.

[0054] Besides the hybridisation conditions, specificity of hybridisation typically also depends on the function of post-hybridisation washes. To remove background resulting from non-specific hybridisation, samples are washed with dilute salt solutions. Critical factors of such washes include the ionic strength and temperature of the final wash solution: the lower the salt concentration and the higher the wash temperature, the higher the stringency of the wash. Wash conditions are typically performed at or below hybridisation stringency. A positive hybridisation gives a signal that is at least twice of that of the background. Generally, suitable stringent conditions for nucleic acid hybridisation assays or gene amplification detection procedures are as set forth above. More or less stringent conditions may also be selected. The skilled artisan is aware of various parameters which may be altered during washing and which will either maintain or change the stringency conditions.

[0055] For example, typical high stringency hybridisation conditions for DNA hybrids longer than 50 nucleotides encompass hybridisation at 65° C. in 1×SSC or at 42° C. in 1×SSC and 50% formamide, followed by washing at 65° C. in 0.3×SSC. Examples of medium stringency hybridisation conditions for DNA hybrids longer than 50 nucleotides encompass hybridisation at 50° C. in 4×SSC or at 40° C. in 6×SSC and 50% formamide, followed by washing at 50° C. in 2×SSC. The length of the hybrid is the anticipated length for the hybridising nucleic acid. When nucleic acids of known sequence are hybridised, the hybrid length may be determined by aligning the sequences and identifying the conserved regions described herein. 1×SSC is 0.15M NaCl and 15 mM sodium citrate; the hybridisation solution and wash solutions may additionally include 5× Denhardt's reagent, 0.5-1.0% SDS, 100 μg/ml denatured, fragmented salmon sperm DNA, 0.5% sodium pyrophosphate.

[0056] For the purposes of defining the level of stringency, reference can be made to Sambrook et al. (2001) Molecular Cloning: a laboratory manual, 3^{rd} Edition, Cold Spring Harbor Laboratory Press, CSH, New York or to Current Protocols in Molecular Biology, John Wiley & Sons, N.Y. (1989 and yearly updates).

### Splice Variant

[0057] The term “splice variant” as used herein encompasses variants of a nucleic acid sequence in which selected introns and/or exons have been excised, replaced, displaced or added, or in which introns have been shortened or lengthened. Such variants will be ones in which the biological activity of the protein is substantially retained; this may be achieved by selectively retaining functional segments of the protein. Such splice variants may be found in nature or may be manmade. Methods for predicting and isolating such splice variants are well known in the art (see for example Foissac and Schiex (2005) BMC Bioinformatics 6: 25).

### Allelic Variant

[0058] Alleles or allelic variants are alternative forms of a given gene, located at the same chromosomal position. Allelic variants encompass Single Nucleotide Polymorphisms (SNPs), as well as Small Insertion/Deletion Polymorphisms (INDELs). The size of INDELs is usually less than 100 bp. SNPs and INDELs form the largest set of sequence variants in naturally occurring polymorphic strains of most organisms.

### Gene Shuffling/Directed Evolution

[0059] Gene shuffling or directed evolution consists of iterations of DNA shuffling followed by appropriate screening and/or selection to generate variants of nucleic acids or portions thereof encoding proteins having a modified biological activity (Castle et al., (2004) Science 304(5674): 1151-4; U.S. Pat. Nos. 5,811,238 and 6,395,547).

### Regulatory Element/Control Sequence/Promoter

[0060] The terms “regulatory element”, “control sequence” and “promoter” are all used interchangeably herein and are to be taken in a broad context to refer to regulatory nucleic acid sequences capable of effecting expression of the sequences to which they are ligated. The term “promoter” typically refers to a nucleic acid control sequence located upstream from the transcriptional start of a gene and which is involved in recognising and binding of RNA polymerase and other proteins, thereby directing transcription of an operably linked nucleic acid. Encompassed by the aforementioned terms are transcriptional regulatory sequences derived from a classical eukaryotic genomic gene (including the TATA box which is required for accurate transcription initiation, with or without a CCAAT box sequence) and additional regulatory elements (i.e. upstream activating sequences, enhancers and silencers) which alter gene expression in response to developmental and/or external stimuli, or in a tissue-specific manner. Also included within the term is a transcriptional regulatory sequence of a classical prokaryotic gene, in which case it may include a −35 box sequence and/or −10 box transcriptional regulatory sequences. The term “regulatory element” also encompasses a synthetic fusion molecule or derivative that confers, activates or enhances expression of a nucleic acid molecule in a cell, tissue or organ.

[0061] A “plant promoter” comprises regulatory elements, which mediate the expression of a coding sequence segment in plant cells. Accordingly, a plant promoter need not be of plant origin, but may originate from viruses or micro-organisms, for example from viruses which attack plant cells. The “plant promoter” can also originate from a plant cell, e.g. from the plant which is transformed with the nucleic acid sequence to be expressed in the inventive process and described herein. This also applies to other “plant” regulatory signals, such as “plant” terminators. The promoters upstream of the nucleotide sequences useful in the methods of the present invention can be modified by one or more nucleotide substitution(s), insertion(s) and/or deletion(s) without interfering with the functionality or activity of either the promoters, the open reading frame (ORF) or the 3′-regulatory region such as terminators or other 3′ regulatory regions which are located away from the ORF. It is furthermore possible that the activity of the promoters is increased by modification of their sequence, or that they are replaced completely by more active promoters, even promoters from heterologous organisms. For expression in plants, the nucleic acid molecule must, as described above, be linked operably to or comprise a suitable promoter which expresses the gene at the right point in time and with the required spatial expression pattern.

[0062] For the identification of functionally equivalent promoters, the promoter strength and/or expression pattern of a candidate promoter may be analysed for example by operably linking the promoter to a reporter gene and assaying the expression level and pattern of the reporter gene in various tissues of the plant. Suitable well-known reporter genes include for example beta-glucuronidase or beta-galactosidase. The promoter activity is assayed by measuring the enzymatic activity of the beta-glucuronidase or beta-galactosidase. The promoter strength and/or expression pattern may then be compared to that of a reference promoter (such as the one used in the methods of the present invention). Alternatively, promoter strength may be assayed by quantifying mRNA levels or by comparing mRNA levels of the nucleic acid used in the methods of the present invention, with mRNA levels of housekeeping genes such as 18S rRNA, using methods known in the art, such as Northern blotting with densitometric analysis of autoradiograms, quantitative real-time PCR or RT-PCR (Heid et al., 1996 Genome Methods 6: 986-994). Generally by “weak promoter” is intended a promoter that drives expression of a coding sequence at a low level. By “low level” is intended at levels of about 1/10,000 transcripts to about 1/100,000 transcripts, to about 1/500,0000 transcripts per cell. Conversely, a “strong promoter” drives expression of a coding sequence at high level, or at about 1/10 transcripts to about 1/100 transcripts to about 1/1000 transcripts per cell. Generally, by “medium strength promoter” is intended a promoter that drives expression of a coding sequence at a lower level than a strong promoter, in particular at a level that is in all instances below that obtained when under the control of a 35S CaMV promoter.

### Operably Linked

[0063] The term “operably linked” as used herein refers to a functional linkage between the promoter sequence and the gene of interest, such that the promoter sequence is able to initiate transcription of the gene of interest.

### Constitutive Promoter

[0064] A “constitutive promoter” refers to a promoter that is transcriptionally active during most, but not necessarily all, phases of growth and development and under most environmental conditions, in at least one cell, tissue or organ. Table 2a below gives examples of constitutive promoters.

TABLE 2a
Examples of constitutive promoters

| Gene Source | Reference |
|---|---|
| Actin | McElroy et al, Plant Cell, 2: 163-171, 1990 |
| HMGP | WO 2004/070039 |
| CAMV 35S | Odell et al, Nature, 313: 810-812, 1985 |
| CaMV 19S | Nilsson et al., Physiol. Plant. 100: 456-462, 1997 |
| GOS2 | de Pater et al, Plant J Nov; 2(6): 837-44, 1992, |
| | WO 2004/065596 |
| Ubiquitin | Christensen et al, Plant Mol. Biol. 18: 675-689, 1992 |
| Rice cyclophilin | Buchholz et al, Plant Mol Biol. 25(5): 837-43, 1994 |
| Maize H3 histone | Lepetit et al, Mol. Gen. Genet. 231: 276-285, 1992 |
| Alfalfa H3 | Wu et al. Plant Mol. Biol. 11: 641-649, 1988 |
| histone | |
| Actin 2 | An et al, Plant J. 10(1); 107-121, 1996 |
| 34S FMV | Sanger et al., Plant. Mol. Biol., 14, 1990: 433-443 |
| Rubisco small | U.S. Pat. No. 4,962,028 |
| subunit | |
| OCS | Leisner (1988) Proc Natl Acad Sci USA 85(5): 2553 |
| SAD1 | Jain et al., Crop Science, 39 (6), 1999: 1696 |
| SAD2 | Jain et al., Crop Science, 39 (6), 1999: 1696 |
| nos | Shaw et al. (1984) Nucleic Acids Res. |
| | 12(20): 7831-7846 |
| V-ATPase | WO 01/14572 |
| Super promoter | WO 95/14098 |
| G-box proteins | WO 94/12015 |

### Ubiquitous Promoter

[0065] A ubiquitous promoter is active in substantially all tissues or cells of an organism.

### Developmentally-Regulated Promoter

[0066] A developmentally-regulated promoter is active during certain developmental stages or in parts of the plant that undergo developmental changes.

### Inducible Promoter

[0067] An inducible promoter has induced or increased transcription initiation in response to a chemical (for a review see Gatz 1997, Annu. Rev. Plant Physiol. Plant Mol. Biol., 48:89-108), environmental or physical stimulus, or may be “stress-inducible”, i.e. activated when a plant is exposed to various stress conditions, or a “pathogen-inducible” i.e. activated when a plant is exposed to exposure to various pathogens.

### Organ-Specific/Tissue-Specific Promoter

[0068] An organ-specific or tissue-specific promoter is one that is capable of preferentially initiating transcription in certain organs or tissues, such as the leaves, roots, seed tissue etc. For example, a “root-specific promoter” is a promoter that is transcriptionally active predominantly in plant roots, substantially to the exclusion of any other parts of a plant, whilst still allowing for any leaky expression in these other plant parts. Promoters able to initiate transcription in certain cells only are referred to herein as “cell-specific”.

[0069] Examples of root-specific promoters are listed in Table 2b below:

TABLE 2b
Examples of root-specific promoters

| Gene Source | Reference |
|---|---|
| RCc3 | Plant Mol Biol. 1995 Jan; 27(2): 237-48 |
| Arabidopsis PHT1 | Kovama et al., 2005; Mudge et al. |
| | (2002, Plant J. 31: 341) |
| Medicago phosphate | Xiao et al., 2006 |
| transporter | |
| Arabidopsis Pyk10 | Nitz et al. (2001) Plant Sci 161(2): 337-346 |
| root-expressible genes | Tingey et al., EMBO J. 6: 1, 1987. |
| tobacco auxin- | Van der Zaal et al., Plant Mol. Biol. 16, 983, |
| inducible gene | 1991. |
| β-tubulin | Oppenheimer, et al., Gene 63: 87, 1988. |
| tobacco root-specific genes | Conkling, et al., Plant Physiol. 93: 1203, |
| | 1990. |
| B. napus G1-3b gene | U.S. Pat. No. 5,401,836 |
| SbPRP1 | Suzuki et al., Plant Mol. Biol. 21: 109-119, |
| | 1993. |
| LRX1 | Baumberger et al. 2001, Genes & Dev. 15: |
| | 1128 |
| BTG-26 Brassica napus | US 20050044585 |
| LeAMT1 (tomato) | Lauter et al. (1996, PNAS 3: 8139) |
| The LeNRT1-1 (tomato) | Lauter et al. (1996, PNAS 3: 8139) |
| class I patatin gene (potato) | Liu et al., Plant Mol. Biol. 153: 386-395, |
| | 1991. |
| KDC1 (Daucus carota) | Downey et al. (2000, J. Biol. Chem. 275: |
| | 39420) |
| TobRB7 gene | W Song (1997) PhD Thesis, North Carolina |
| | State University, Raleigh, NC USA |
| OsRAB5a (rice) | Wang et al. 2002, Plant Sci. 163: 273 |
| ALF5 (Arabidopsis) | Diener et al. (2001, Plant Cell 13: 1625) |
| NRT2; 1Np | Quesada et al. (1997, Plant Mol. Biol. 34: |
| (N. plumbaginifolia) | 265) |

[0070] A seed-specific promoter is transcriptionally active predominantly in seed tissue, but not necessarily exclusively in seed tissue (in cases of leaky expression). The seed-specific promoter may be active during seed development and/or during germination. The seed specific promoter may be endosperm/aleurone/embryo specific. Examples of seed-specific promoters (endosperm/aleurone/embryo specific) are shown in Table 2c to Table 2f below. Further examples of seed-specific promoters are given in Qing Qu and Takaiwa (Plant Biotechnol. J. 2, 113-125, 2004), which disclosure is incorporated by reference herein as if fully set forth.

TABLE 2c
Examples of seed-specific promoters

| Gene source | Reference |
|---|---|
| seed-specific genes | Simon et al., Plant Mol. Biol. 5: 191, 1985; |
| | Scofield et al., J. Biol. Chem. 262: 12202, 1987.; |
| | Baszczynski et al., Plant Mol. Biol. 14: 633, 1990. |
| Brazil Nut albumin | Pearson et al., Plant Mol. Biol. 18: 235-245, 1992. |
| legumin | Ellis et al., Plant Mol. Biol. 10: 203-214, 1988. |
| glutelin (rice) | Takaiwa et al., Mol. Gen. Genet. 208: 15-22, 1986; |
| | Takaiwa et al., FEBS Letts. 221: 43-47, 1987. |
| zein | Matzke et al Plant Mol Biol, 14(3): 323-32 1990 |
| napA | Stalberg et al, Planta 199: 515-519, 1996. |
| wheat LMW and HMW glutenin-1 | Mol Gen Genet 216: 81-90, 1989; NAR 17: 461-2, 1989 |
| wheat SPA | Albani et al, Plant Cell, 9: 171-184, 1997 |
| wheat α, β, γ-gliadins | EMBO J. 3: 1409-15, 1984 |
| barley Itr1 promoter | Diaz et al. (1995) Mol Gen Genet 248(5): 592-8 |
| barley B1, C, D, hordein | Theor Appl Gen 98: 1253-62, 1999; Plant J 4: 343-55, 1993; |
| | Mol Gen Genet 250: 750-60, 1996 |
| barley DOF | Mena et al, The Plant Journal, 116(1): 53-62, 1998 |
| blz2 | EP99106056.7 |
| synthetic promoter | Vicente-Carbajosa et al., Plant J. 13: 629-640, 1998. |
| rice prolamin NRP33 | Wu et al, Plant Cell Physiology 39(8) 885-889, 1998 |
| rice a-globulin Glb-1 | Wu et al, Plant Cell Physiology 39(8) 885-889, 1998 |
| rice OSH1 | Sato et al, Proc. Natl. Acad. Sci. USA, 93: 8117-8122, |
| | 1996 |
| rice α-globulin REB/OHP-1 | Nakase et al. Plant Mol. Biol. 33: 513-522, 1997 |
| rice ADP-glucose pyrophosphorylase | Trans Res 6: 157-68, 1997 |
| maize ESR gene family | Plant J 12: 235-46, 1997 |
| sorghum α-kafirin | DeRose et al., Plant Mol. Biol 32: 1029-35, 1996 |
| KNOX | Postma-Haarsma et al, Plant Mol. Biol. 39: 257-71, 1999 |
| rice oleosin | Wu et al, J. Biochem. 123: 386, 1998 |
| sunflower oleosin | Cummins et al., Plant Mol. Biol. 19: 873-876, 1992 |
| PRO0117, putative rice 40S | WO 2004/070039 |
| ribosomal protein | |
| PRO0136, rice alanine | unpublished |
| aminotransferase | |
| PRO0147, trypsin inhibitor ITR1 | unpublished |
| (barley) | |
| PRO0151, rice WSI18 | WO 2004/070039 |
| PRO0175, rice RAB21 | WO 2004/070039 |
| PRO005 | WO 2004/070039 |
| PRO0095 | WO 2004/070039 |
| α-amylase (Amy32b) | Lanahan et al, Plant Cell 4: 203-211, 1992; Skriver et al, |
| | Proc Natl Acad Sci USA 88: 7266-7270, 1991 |
| cathepsin β-like gene | Cejudo et al, Plant Mol Biol 20: 849-856, 1992 |
| Barley Ltp2 | Kalla et al., Plant J. 6: 849-60, 1994 |
| Chi26 | Leah et al., Plant J. 4: 579-89, 1994 |
| Maize B-Peru | Selinger et al., Genetics 149; 1125-38, 1998 |

TABLE 2d
examples of endosperm-specific promoters

| Gene source | Reference |
|---|---|
| glutelin (rice) | Takaiwa et al. (1986) Mol Gen Genet 208: 15-22; |
| | Takaiwa et al. (1987) FEBS Letts. 221: 43-47 |
| zein | Matzke et al., (1990) Plant Mol Biol 14(3): 323-32 |
| wheat LMW and | Colot et al. (1989) Mol Gen Genet 216: 81-90, |
| HMW glutenin-1 | Anderson et al. (1989) NAR 17: 461-2 |
| wheat SPA | Albani et al. (1997) Plant Cell 9: 171-184 |
| wheat gliadins | Rafalski et al. (1984) EMBO 3: 1409-15 |
| barley Itr1 promoter | Diaz et al. (1995) Mol Gen Genet 248(5): 592-8 |
| barley B1, C, D, | Cho et al. (1999) Theor Appl Genet 98: 1253-62; |
| hordein | Muller et al. (1993) Plant J 4: 343-55; |
| | Sorenson et al. (1996) Mol Gen Genet 250: 750-60 |
| barley DOF | Mena et al, (1998) Plant J 116(1): 53-62 |
| blz2 | Onate et al. (1999) J Biol Chem 274(14): 9175-82 |
| synthetic promoter | Vicente-Carbajosa et al. (1998) Plant J 13: 629-640 |
| rice prolamin | Wu et al, (1998) Plant Cell Physiol 39(8) 885-889 |
| NRP33 | |
| rice globulin Glb-1 | Wu et al. (1998) Plant Cell Physiol 39(8) 885-889 |
| rice globulin | Nakase et al. (1997) Plant Molec Biol 33: 513-522 |
| REB/OHP-1 | |
| rice ADP-glucose | Russell et al. (1997) Trans Res 6: 157-68 |
| pyrophosphorylase | |
| maize ESR gene | Opsahl-Ferstad et al. (1997) Plant J 12: 235-46 |
| family | |
| sorghum kafirin | DeRose et al. (1996) Plant Mol Biol 32: 1029-35 |

TABLE 2e
Examples of embryo specific promoters:

| Gene source | Reference |
|---|---|
| rice OSH1 | Sato et al, Proc. Natl. Acad. Sci. USA, 93: 8117-8122, |
| | 1996 |
| KNOX | Postma-Haarsma et al, Plant Mol. Biol. 39: 257-71, 1999 |
| PRO0151 | WO 2004/070039 |
| PRO0175 | WO 2004/070039 |
| PRO005 | WO 2004/070039 |
| PRO0095 | WO 2004/070039 |

TABLE 2f
Examples of aleurone-specific promoters:

| Gene source | Reference |
|---|---|
| α-amylase (Amy32b) | Lanahan et al, Plant Cell 4: 203-211, 1992; |
| | Skriver et al, Proc Natl Acad Sci USA 88: 7266- |
| | 7270, 1991 |
| cathepsin β-like gene | Cejudo et al, Plant Mol Biol 20: 849-856, 1992 |
| Barley Ltp2 | Kalla et al., Plant J. 6: 849-60, 1994 |
| Chi26 | Leah et al., Plant J. 4: 579-89, 1994 |
| Maize B-Peru | Selinger et al., Genetics 149; 1125-38, 1998 |

[0071] A green tissue-specific promoter as defined herein is a promoter that is transcriptionally active predominantly in green tissue, substantially to the exclusion of any other parts of a plant, whilst still allowing for any leaky expression in these other plant parts.

[0072] Examples of green tissue-specific promoters which may be used to perform the methods of the invention are shown in Table 2g below.

TABLE 2g
Examples of green tissue-specific promoters

| Gene | Expression | Reference |
|---|---|---|
| Maize Orthophosphate dikinase | Leaf specific | Fukavama et al., 2001 |
| Maize Phosphoenolpyruvate | Leaf specific | Kausch et al., 2001 |
| carboxylase | | |
| Rice Phosphoenolpyruvate | Leaf specific | Liu et al., 2003 |
| carboxylase | | |
| Rice small subunit Rubisco | Leaf specific | Nomura et al., 2000 |
| rice beta expansin EXBP9 | Shoot specific | WO 2004/070039 |
| Pigeonpea small subunit Rubisco | Leaf specific | Panguluri et al., 2005 |
| Pea RBCS3A | Leaf specific | |

[0073] Another example of a tissue-specific promoter is a meristem-specific promoter, which is transcriptionally active predominantly in meristematic tissue, substantially to the exclusion of any other parts of a plant, whilst still allowing for any leaky expression in these other plant parts. Examples of green meristem-specific promoters which may be used to perform the methods of the invention are shown in Table 2h below.

TABLE 2h
Examples of meristem-specific promoters

| Gene source | Expression pattern | Reference |
|---|---|---|
| rice OSH1 | Shoot apical meristem, from | Sato et al. (1996) Proc. |
| | embryo globular stage to | Natl. Acad. Sci. |
| | seedling stage | USA, 93: 8117-8122 |
| Rice | Meristem specific | BAD87835.1 |
| metallothionein | | |
| WAK1 & WAK 2 | Shoot and root apical | Wagner & Kohorn |
| | meristems, and in expanding | (2001) Plant Cell |
| | leaves and sepals | 13(2): 303-318 |

### Terminator

[0074] The term “terminator” encompasses a control sequence which is a DNA sequence at the end of a transcriptional unit which signals 3′ processing and polyadenylation of a primary transcript and termination of transcription. The terminator can be derived from the natural gene, from a variety of other plant genes, or from T-DNA. The terminator to be added may be derived from, for example, the nopaline synthase or octopine synthase genes, or alternatively from another plant gene, or less preferably from any other eukaryotic gene.

### Modulation

[0075] The term “modulation” means in relation to expression or gene expression, a process in which the expression level is changed by said gene expression in comparison to the control plant, the expression level may be increased or decreased. The original, unmodulated expression may be of any kind of expression of a structural RNA (rRNA, tRNA) or mRNA with subsequent translation. The term “modulating the activity” shall mean any change of the expression of the inventive nucleic acid sequences or encoded proteins, which leads to increased yield and/or increased growth of the plants.

### Expression

[0076] The term “expression” or “gene expression” means the transcription of a specific gene or specific genes or specific genetic construct. The term “expression” or “gene expression” in particular means the transcription of a gene or genes or genetic construct into structural RNA (rRNA, tRNA) or mRNA with or without subsequent translation of the latter into a protein. The process includes transcription of DNA and processing of the resulting mRNA product.

### Increased Expression/Overexpression

[0077] The term “increased expression” or “overexpression” as used herein means any form of expression that is additional to the original wild-type expression level.

[0078] Methods for increasing expression of genes or gene products are well documented in the art and include, for example, overexpression driven by appropriate promoters, the use of transcription enhancers or translation enhancers. Isolated nucleic acids which serve as promoter or enhancer elements may be introduced in an appropriate position (typically upstream) of a non-heterologous form of a polynucleotide so as to upregulate expression of a nucleic acid encoding the polypeptide of interest. For example, endogenous promoters may be altered in vivo by mutation, deletion, and/or substitution (see, Kmiec, U.S. Pat. No. 5,565,350; Zarling et al., WO9322443), or isolated promoters may be introduced into a plant cell in the proper orientation and distance from a gene of the present invention so as to control the expression of the gene.

[0079] If polypeptide expression is desired, it is generally desirable to include a polyadenylation region at the 3′-end of a polynucleotide coding region. The polyadenylation region can be derived from the natural gene, from a variety of other plant genes, or from T-DNA. The 3′ end sequence to be added may be derived from, for example, the nopaline synthase or octopine synthase genes, or alternatively from another plant gene, or less preferably from any other eukaryotic gene.

[0080] An intron sequence may also be added to the 5′ untranslated region (UTR) or the coding sequence of the partial coding sequence to increase the amount of the mature message that accumulates in the cytosol. Inclusion of a spliceable intron in the transcription unit in both plant and animal expression constructs has been shown to increase gene expression at both the mRNA and protein levels up to 1000-fold (Buchman and Berg (1988) Mol. Cell biol. 8: 4395-4405; Callis et al. (1987) Genes Dev 1:1183-1200). Such intron enhancement of gene expression is typically greatest when placed near the 5′ end of the transcription unit. Use of the maize introns Adh1-S intron 1, 2, and 6, the Bronze-1 intron are known in the art. For general information see: The Maize Handbook, Chapter 116, Freeling and Walbot, Eds., Springer, N.Y. (1994).

### Endogenous Gene

[0081] Reference herein to an “endogenous” gene not only refers to the gene in question as found in a plant in its natural form (i.e., without there being any human intervention), but also refers to that same gene (or a substantially homologous nucleic acid/gene) in an isolated form subsequently (re)introduced into a plant (a transgene). For example, a transgenic plant containing such a transgene may encounter a substantial reduction of the transgene expression and/or substantial reduction of expression of the endogenous gene. The isolated gene may be isolated from an organism or may be manmade, for example by chemical synthesis.

### Decreased Expression

[0082] Reference herein to “decreased expression” or “reduction or substantial elimination” of expression is taken to mean a decrease in endogenous gene expression and/or polypeptide levels and/or polypeptide activity relative to control plants. The reduction or substantial elimination is in increasing order of preference at least 10%, 20%, 30%, 40% or 50%, 60%, 70%, 80%, 85%, 90%, or 95%, 96%, 97%, 98%, 99% or more reduced compared to that of control plants. Methods for decreasing expression are known in the art and the skilled person would readily be able to adapt the known methods for silencing so as to achieve reduction of expression of an endogenous gene in a whole plant or in parts thereof through the use of an appropriate promoter, for example.

[0083] For the reduction or substantial elimination of expression an endogenous gene in a plant, a sufficient length of substantially contiguous nucleotides of a nucleic acid sequence is required. In order to perform gene silencing, this may be as little as 20, 19, 18, 17, 16, 15, 14, 13, 12, 11, 10 or fewer nucleotides, alternatively this may be as much as the entire gene (including the 5′ and/or 3′ UTR, either in part or in whole). The stretch of substantially contiguous nucleotides may be derived from the nucleic acid encoding the protein of interest (target gene), or from any nucleic acid capable of encoding an orthologue, paralogue or homologue of the protein of interest. Preferably, the stretch of substantially contiguous nucleotides is capable of forming hydrogen bonds with the target gene (either sense or antisense strand), more preferably, the stretch of substantially contiguous nucleotides has, in increasing order of preference, 50%, 60%, 70%, 80%, 85%, 90%, 95%, 96%, 97%, 98%, 99%, 100% sequence identity to the target gene (either sense or antisense strand). A nucleic acid sequence encoding a (functional) polypeptide is not a requirement for the various methods discussed herein for the reduction or substantial elimination of expression of an endogenous gene.

[0084] Examples of various methods for the reduction or substantial elimination of expression in a plant of an endogenous gene, or for lowering levels and/or activity of a protein, are known to the skilled in the art. A skilled person would readily be able to adapt the known methods for silencing, so as to achieve reduction of expression of an endogenous gene in a whole plant or in parts thereof through the use of an appropriate promoter, for example.

[0085] This reduction or substantial elimination of expression may be achieved using routine tools and techniques. A preferred method for the reduction or substantial elimination of endogenous gene expression is by introducing and expressing in a plant a genetic construct into which the nucleic acid (in this case a stretch of substantially contiguous nucleotides derived from the gene of interest, or from any nucleic acid capable of encoding an orthologue, paralogue or homologue of any one of the protein of interest) is cloned as an inverted repeat (in part or completely), separated by a spacer (non-coding DNA).

[0086] In such a preferred method, expression of the endogenous gene is reduced or substantially eliminated through RNA-mediated silencing using an inverted repeat of a nucleic acid or a part thereof (in this case a stretch of substantially contiguous nucleotides derived from the gene of interest, or from any nucleic acid capable of encoding an orthologue, paralogue or homologue of the protein of interest), preferably capable of forming a hairpin structure. The inverted repeat is cloned in an expression vector comprising control sequences. A non-coding DNA nucleic acid sequence (a spacer, for example a matrix attachment region fragment (MAR), an intron, a polylinker, etc.) is located between the two inverted nucleic acids forming the inverted repeat. After transcription of the inverted repeat, a chimeric RNA with a self-complementary structure is formed (partial or complete). This double-stranded RNA structure is referred to as the hairpin RNA (hpRNA). The hpRNA is processed by the plant into siRNAs that are incorporated into an RNA-induced silencing complex (RISC). The RISC further cleaves the mRNA transcripts, thereby substantially reducing the number of mRNA transcripts to be translated into polypeptides. For further general details see for example, Grierson et al. (1998) WO 98/53083; Waterhouse et al. (1999) WO 99/53050).

[0087] Performance of the methods of the invention does not rely on introducing and expressing in a plant a genetic construct into which the nucleic acid is cloned as an inverted repeat, but any one or more of several well-known “gene silencing” methods may be used to achieve the same effects.

[0088] One such method for the reduction of endogenous gene expression is RNA-mediated silencing of gene expression (downregulation). Silencing in this case is triggered in a plant by a double stranded RNA sequence (dsRNA) that is substantially similar to the target endogenous gene. This dsRNA is further processed by the plant into about 20 to about 26 nucleotides called short interfering RNAs (siRNAs). The siRNAs are incorporated into an RNA-induced silencing complex (RISC) that cleaves the mRNA transcript of the endogenous target gene, thereby substantially reducing the number of mRNA transcripts to be translated into a polypeptide. Preferably, the double stranded RNA sequence corresponds to a target gene.

[0089] Another example of an RNA silencing method involves the introduction of nucleic acid sequences or parts thereof (in this case a stretch of substantially contiguous nucleotides derived from the gene of interest, or from any nucleic acid capable of encoding an orthologue, paralogue or homologue of the protein of interest) in a sense orientation into a plant. “Sense orientation” refers to a DNA sequence that is homologous to an mRNA transcript thereof. Introduced into a plant would therefore be at least one copy of the nucleic acid sequence. The additional nucleic acid sequence will reduce expression of the endogenous gene, giving rise to a phenomenon known as co-suppression. The reduction of gene expression will be more pronounced if several additional copies of a nucleic acid sequence are introduced into the plant, as there is a positive correlation between high transcript levels and the triggering of co-suppression.

[0090] Another example of an RNA silencing method involves the use of antisense nucleic acid sequences. An “antisense” nucleic acid sequence comprises a nucleotide sequence that is complementary to a “sense” nucleic acid sequence encoding a protein, i.e. complementary to the coding strand of a double-stranded cDNA molecule or complementary to an mRNA transcript sequence. The antisense nucleic acid sequence is preferably complementary to the endogenous gene to be silenced. The complementarity may be located in the “coding region” and/or in the “non-coding region” of a gene. The term “coding region” refers to a region of the nucleotide sequence comprising codons that are translated into amino acid residues. The term “non-coding region” refers to 5′ and 3′ sequences that flank the coding region that are transcribed but not translated into amino acids (also referred to as 5′ and 3′ untranslated regions).

[0091] Antisense nucleic acid sequences can be designed according to the rules of Watson and Crick base pairing. The antisense nucleic acid sequence may be complementary to the entire nucleic acid sequence (in this case a stretch of substantially contiguous nucleotides derived from the gene of interest, or from any nucleic acid capable of encoding an orthologue, paralogue or homologue of the protein of interest), but may also be an oligonucleotide that is antisense to only a part of the nucleic acid sequence (including the mRNA 5′ and 3′ UTR). For example, the antisense oligonucleotide sequence may be complementary to the region surrounding the translation start site of an mRNA transcript encoding a polypeptide. The length of a suitable antisense oligonucleotide sequence is known in the art and may start from about 50, 45, 40, 35, 30, 25, 20, 15 or 10 nucleotides in length or less. An antisense nucleic acid sequence according to the invention may be constructed using chemical synthesis and enzymatic ligation reactions using methods known in the art. For example, an antisense nucleic acid sequence (e.g., an antisense oligonucleotide sequence) may be chemically synthesized using naturally occurring nucleotides or variously modified nucleotides designed to increase the biological stability of the molecules or to increase the physical stability of the duplex formed between the antisense and sense nucleic acid sequences, e.g., phosphorothioate derivatives and acridine substituted nucleotides may be used. Examples of modified nucleotides that may be used to generate the antisense nucleic acid sequences are well known in the art. Known nucleotide modifications include methylation, cyclization and ‘caps’ and substitution of one or more of the naturally occurring nucleotides with an analogue such as inosine. Other modifications of nucleotides are well known in the art.

[0092] The antisense nucleic acid sequence can be produced biologically using an expression vector into which a nucleic acid sequence has been subcloned in an antisense orientation (i.e., RNA transcribed from the inserted nucleic acid will be of an antisense orientation to a target nucleic acid of interest). Preferably, production of antisense nucleic acid sequences in plants occurs by means of a stably integrated nucleic acid construct comprising a promoter, an operably linked antisense oligonucleotide, and a terminator.

[0093] The nucleic acid molecules used for silencing in the methods of the invention (whether introduced into a plant or generated in situ) hybridize with or bind to mRNA transcripts and/or genomic DNA encoding a polypeptide to thereby inhibit expression of the protein, e.g., by inhibiting transcription and/or translation. The hybridization can be by conventional nucleotide complementarity to form a stable duplex, or, for example, in the case of an antisense nucleic acid sequence which binds to DNA duplexes, through specific interactions in the major groove of the double helix. Antisense nucleic acid sequences may be introduced into a plant by transformation or direct injection at a specific tissue site. Alternatively, antisense nucleic acid sequences can be modified to target selected cells and then administered systemically. For example, for systemic administration, antisense nucleic acid sequences can be modified such that they specifically bind to receptors or antigens expressed on a selected cell surface, e.g., by linking the antisense nucleic acid sequence to peptides or antibodies which bind to cell surface receptors or antigens. The antisense nucleic acid sequences can also be delivered to cells using the vectors described herein.

[0094] According to a further aspect, the antisense nucleic acid sequence is an a-anomeric nucleic acid sequence. An a-anomeric nucleic acid sequence forms specific double-stranded hybrids with complementary RNA in which, contrary to the usual b-units, the strands run parallel to each other (Gaultier et al. (1987) Nucl Ac Res 15: 6625-6641). The antisense nucleic acid sequence may also comprise a 2′-o-methylribonucleotide (Inoue et al. (1987) Nucl Ac Res 15, 6131-6148) or a chimeric RNA-DNA analogue (Inoue et al. (1987) FEBS Lett. 215, 327-330).

[0095] The reduction or substantial elimination of endogenous gene expression may also be performed using ribozymes. Ribozymes are catalytic RNA molecules with ribonuclease activity that are capable of cleaving a single-stranded nucleic acid sequence, such as an mRNA, to which they have a complementary region. Thus, ribozymes (e.g., hammerhead ribozymes (described in Haselhoff and Gerlach (1988) Nature 334, 585-591) can be used to catalytically cleave mRNA transcripts encoding a polypeptide, thereby substantially reducing the number of mRNA transcripts to be translated into a polypeptide. A ribozyme having specificity for a nucleic acid sequence can be designed (see for example: Cech et al. U.S. Pat. No. 4,987,071; and Cech et al. U.S. Pat. No. 5,116,742). Alternatively, mRNA transcripts corresponding to a nucleic acid sequence can be used to select a catalytic RNA having a specific ribonuclease activity from a pool of RNA molecules (Bartel and Szostak (1993) Science 261, 1411-1418). The use of ribozymes for gene silencing in plants is known in the art (e.g., Atkins et al. (1994) WO 94/00012; Lenne et al. (1995) WO 95/03404; Lutziger et al. (2000) WO 00/00619; Prinsen et al. (1997) WO 97/13865 and Scott et al. (1997) WO 97/38116).

[0096] Gene silencing may also be achieved by insertion mutagenesis (for example, T-DNA insertion or transposon insertion) or by strategies as described by, among others, Angell and Baulcombe ((1999) Plant J 20(3): 357-62), (Amplicon VIGS WO 98/36083), or Baulcombe (WO 99/15682).

[0097] Gene silencing may also occur if there is a mutation on an endogenous gene and/or a mutation on an isolated gene/nucleic acid subsequently introduced into a plant. The reduction or substantial elimination may be caused by a non-functional polypeptide. For example, the polypeptide may bind to various interacting proteins; one or more mutation(s) and/or truncation(s) may therefore provide for a polypeptide that is still able to bind interacting proteins (such as receptor proteins) but that cannot exhibit its normal function (such as signalling ligand).

[0098] A further approach to gene silencing is by targeting nucleic acid sequences complementary to the regulatory region of the gene (e.g., the promoter and/or enhancers) to form triple helical structures that prevent transcription of the gene in target cells. See Helene, C., Anticancer Drug Res. 6, 569-84, 1991; Helene et al., Ann. N.Y. Acad. Sci. 660, 27-36 1992; and Maher, L. J. Bioassays 14, 807-15, 1992.

[0099] Other methods, such as the use of antibodies directed to an endogenous polypeptide for inhibiting its function in planta, or interference in the signalling pathway in which a polypeptide is involved, will be well known to the skilled man. In particular, it can be envisaged that manmade molecules may be useful for inhibiting the biological function of a target polypeptide, or for interfering with the signalling pathway in which the target polypeptide is involved.

[0100] Alternatively, a screening program may be set up to identify in a plant population natural variants of a gene, which variants encode polypeptides with reduced activity. Such natural variants may also be used for example, to perform homologous recombination.

[0101] Artificial and/or natural microRNAs (miRNAs) may be used to knock out gene expression and/or mRNA translation. Endogenous miRNAs are single stranded small RNAs of typically 19-24 nucleotides long. They function primarily to regulate gene expression and/or mRNA translation. Most plant microRNAs (miRNAs) have perfect or near-perfect complementarity with their target sequences. However, there are natural targets with up to five mismatches. They are processed from longer non-coding RNAs with characteristic fold-back structures by double-strand specific RNases of the Dicer family. Upon processing, they are incorporated in the RNA-induced silencing complex (RISC) by binding to its main component, an Argonaute protein. mRNAs serve as the specificity components of RISC, since they base-pair to target nucleic acids, mostly mRNAs, in the cytoplasm. Subsequent regulatory events include target mRNA cleavage and destruction and/or translational inhibition. Effects of miRNA overexpression are thus often reflected in decreased mRNA levels of target genes.

[0102] Artificial microRNAs (amiRNAs), which are typically 21 nucleotides in length, can be genetically engineered specifically to negatively regulate gene expression of single or multiple genes of interest. Determinants of plant microRNA target selection are well known in the art. Empirical parameters for target recognition have been defined and can be used to aid in the design of specific amiRNAs, (Schwab et al., Dev. Cell 8, 517-527, 2005). Convenient tools for design and generation of amiRNAs and their precursors are also available to the public (Schwab et al., Plant Cell 18, 1121-1133, 2006).

[0103] For optimal performance, the gene silencing techniques used for reducing expression in a plant of an endogenous gene requires the use of nucleic acid sequences from monocotyledonous plants for transformation of monocotyledonous plants, and from dicotyledonous plants for transformation of dicotyledonous plants. Preferably, a nucleic acid sequence from any given plant species is introduced into that same species. For example, a nucleic acid sequence from rice is transformed into a rice plant. However, it is not an absolute requirement that the nucleic acid sequence to be introduced originates from the same plant species as the plant in which it will be introduced. It is sufficient that there is substantial homology between the endogenous target gene and the nucleic acid to be introduced.

[0104] Described above are examples of various methods for the reduction or substantial elimination of expression in a plant of an endogenous gene. A person skilled in the art would readily be able to adapt the aforementioned methods for silencing so as to achieve reduction of expression of an endogenous gene in a whole plant or in parts thereof through the use of an appropriate promoter, for example.

### Selectable Marker (Gene)/Reporter Gene

[0105] “Selectable marker”, “selectable marker gene” or “reporter gene” includes any gene that confers a phenotype on a cell in which it is expressed to facilitate the identification and/or selection of cells that are transfected or transformed with a nucleic acid construct of the invention. These marker genes enable the identification of a successful transfer of the nucleic acid molecules via a series of different principles. Suitable markers may be selected from markers that confer antibiotic or herbicide resistance, that introduce a new metabolic trait or that allow visual selection. Examples of selectable marker genes include genes conferring resistance to antibiotics (such as nptll that phosphorylates neomycin and kanamycin, or hpt, phosphorylating hygromycin, or genes conferring resistance to, for example, bleomycin, streptomycin, tetracyclin, chloramphenicol, ampicillin, gentamycin, geneticin (G418), spectinomycin or blasticidin), to herbicides (for example bar which provides resistance to Basta®; aroA or gox providing resistance against glyphosate, or the genes conferring resistance to, for example, imidazolinone, phosphinothricin or sulfonylurea), or genes that provide a metabolic trait (such as manA that allows plants to use mannose as sole carbon source or xylose isomerase for the utilisation of xylose, or antinutritive markers such as the resistance to 2-deoxyglucose). Expression of visual marker genes results in the formation of colour (for example β-glucuronidase, GUS or β-galactosidase with its coloured substrates, for example X-Gal), luminescence (such as the luciferin/luceferase system) or fluorescence (Green Fluorescent Protein, GFP, and derivatives thereof). This list represents only a small number of possible markers. The skilled worker is familiar with such markers. Different markers are preferred, depending on the organism and the selection method.

[0106] It is known that upon stable or transient integration of nucleic acids into plant cells, only a minority of the cells takes up the foreign DNA and, if desired, integrates it into its genome, depending on the expression vector used and the transfection technique used. To identify and select these integrants, a gene coding for a selectable marker (such as the ones described above) is usually introduced into the host cells together with the gene of interest. These markers can for example be used in mutants in which these genes are not functional by, for example, deletion by conventional methods. Furthermore, nucleic acid molecules encoding a selectable marker can be introduced into a host cell on the same vector that comprises the sequence encoding the polypeptides of the invention or used in the methods of the invention, or else in a separate vector. Cells which have been stably transfected with the introduced nucleic acid can be identified for example by selection (for example, cells which have integrated the selectable marker survive whereas the other cells die). The marker genes may be removed or excised from the transgenic cell once they are no longer needed. Techniques for marker gene removal are known in the art, useful techniques are described above in the definitions section.

[0107] Since the marker genes, particularly genes for resistance to antibiotics and herbicides, are no longer required or are undesired in the transgenic host cell once the nucleic acids have been introduced successfully, the process according to the invention for introducing the nucleic acids advantageously employs techniques which enable the removal or excision of these marker genes. One such a method is what is known as co-transformation. The co-transformation method employs two vectors simultaneously for the transformation, one vector bearing the nucleic acid according to the invention and a second bearing the marker gene(s). A large proportion of transformants receives or, in the case of plants, comprises (up to 40% or more of the transformants), both vectors. In case of transformation with Agrobacteria, the transformants usually receive only a part of the vector, i.e. the sequence flanked by the T-DNA, which usually represents the expression cassette. The marker genes can subsequently be removed from the transformed plant by performing crosses. In another method, marker genes integrated into a transposon are used for the transformation together with desired nucleic acid (known as the Ac/Ds technology). The transformants can be crossed with a transposase source or the transformants are transformed with a nucleic acid construct conferring expression of a transposase, transiently or stable. In some cases (approx. 10%), the transposon jumps out of the genome of the host cell once transformation has taken place successfully and is lost. In a further number of cases, the transposon jumps to a different location. In these cases the marker gene must be eliminated by performing crosses. In microbiology, techniques were developed which make possible, or facilitate, the detection of such events. A further advantageous method relies on what is known as recombination systems; whose advantage is that elimination by crossing can be dispensed with. The best-known system of this type is what is known as the Cre/lox system. Cre1 is a recombinase that removes the sequences located between the loxP sequences. If the marker gene is integrated between the loxP sequences, it is removed once transformation has taken place successfully, by expression of the recombinase. Further recombination systems are the HIN/HIX, FLP/FRT and REP/STB system (Tribble et al., J. Biol. Chem., 275, 2000: 22255-22267; Velmurugan et al., J. Cell Biol., 149, 2000: 553-566). A site-specific integration into the plant genome of the nucleic acid sequences according to the invention is possible. Naturally, these methods can also be applied to microorganisms such as yeast, fungi or bacteria.

### Transgenic/Transgene/Recombinant

[0108] For the purposes of the invention, “transgenic”, “transgene” or “recombinant” means with regard to, for example, a nucleic acid sequence, an expression cassette, gene construct or a vector comprising the nucleic acid sequence or an organism transformed with the nucleic acid sequences, expression cassettes or vectors according to the invention, all those constructions brought about by recombinant methods in which either
[0109] (a) the nucleic acid sequences encoding proteins useful in the methods of the invention, or
[0110] (b) genetic control sequence(s) which is operably linked with the nucleic acid sequence according to the invention, for example a promoter, or
[0111] (c) a) and b)
   are not located in their natural genetic environment or have been modified by recombinant methods, it being possible for the modification to take the form of, for example, a substitution, addition, deletion, inversion or insertion of one or more nucleotide residues. The natural genetic environment is understood as meaning the natural genomic or chromosomal locus in the original plant or the presence in a genomic library. In the case of a genomic library, the natural genetic environment of the nucleic acid sequence is preferably retained, at least in part. The environment flanks the nucleic acid sequence at least on one side and has a sequence length of at least 50 bp, preferably at least 500 bp, especially preferably at least 1000 bp, most preferably at least 5000 bp. A naturally occurring expression cassette—for example the naturally occurring combination of the natural promoter of the nucleic acid sequences with the corresponding nucleic acid sequence encoding a polypeptide useful in the methods of the present invention, as defined above—becomes a transgenic expression cassette when this expression cassette is modified by non-natural, synthetic (“artificial”) methods such as, for example, mutagenic treatment. Suitable methods are described, for example, in U.S. Pat. No. 5,565,350 or WO 00/15815.

[0112] A transgenic plant for the purposes of the invention is thus understood as meaning, as above, that the nucleic acids used in the method of the invention are not at their natural locus in the genome of said plant, it being possible for the nucleic acids to be expressed homologously or heterologously. However, as mentioned, transgenic also means that, while the nucleic acids according to the invention or used in the inventive method are at their natural position in the genome of a plant, the sequence has been modified with regard to the natural sequence, and/or that the regulatory sequences of the natural sequences have been modified. Transgenic is preferably understood as meaning the expression of the nucleic acids according to the invention at an unnatural locus in the genome, i.e. homologous or, preferably, heterologous expression of the nucleic acids takes place. Preferred transgenic plants are mentioned herein.

### Transformation

[0113] The term “introduction” or “transformation” as referred to herein encompasses the transfer of an exogenous polynucleotide into a host cell, irrespective of the method used for transfer. Plant tissue capable of subsequent clonal propagation, whether by organogenesis or embryogenesis, may be transformed with a genetic construct of the present invention and a whole plant regenerated there from. The particular tissue chosen will vary depending on the clonal propagation systems available for, and best suited to, the particular species being transformed. Exemplary tissue targets include leaf disks, pollen, embryos, cotyledons, hypocotyls, megagametophytes, callus tissue, existing meristematic tissue (e.g., apical meristem, axillary buds, and root meristems), and induced meristem tissue (e.g., cotyledon meristem and hypocotyl meristem). The polynucleotide may be transiently or stably introduced into a host cell and may be maintained non-integrated, for example, as a plasmid. Alternatively, it may be integrated into the host genome. The resulting transformed plant cell may then be used to regenerate a transformed plant in a manner known to persons skilled in the art.

[0114] The transfer of foreign genes into the genome of a plant is called transformation. Transformation of plant species is now a fairly routine technique. Advantageously, any of several transformation methods may be used to introduce the gene of interest into a suitable ancestor cell. The methods described for the transformation and regeneration of plants from plant tissues or plant cells may be utilized for transient or for stable transformation. Transformation methods include the use of liposomes, electroporation, chemicals that increase free DNA uptake, injection of the DNA directly into the plant, particle gun bombardment, transformation using viruses or pollen and microprojection. Methods may be selected from the calcium/polyethylene glycol method for protoplasts (Krens, F. A. et al., (1982) Nature 296, 72-74; Negrutiu I et al. (1987) Plant Mol Biol 8: 363-373); electroporation of protoplasts (Shillito R. D. et al. (1985) Bio/Technol 3, 1099-1102); microinjection into plant material (Crossway A et al., (1986) Mol. Gen. Genet. 202: 179-185); DNA or RNA-coated particle bombardment (Klein T M et al., (1987) Nature 327: 70) infection with (non-integrative) viruses and the like. Transgenic plants, including transgenic crop plants, are preferably produced via Agrobacterium-mediated transformation. An advantageous transformation method is the transformation in planta. To this end, it is possible, for example, to allow the agrobacteria to act on plant seeds or to inoculate the plant meristem with agrobacteria. It has proved particularly expedient in accordance with the invention to allow a suspension of transformed agrobacteria to act on the intact plant or at least on the flower primordia. The plant is subsequently grown on until the seeds of the treated plant are obtained (Clough and Bent, Plant J. (1998) 16, 735-743). Methods for Agrobacterium-mediated transformation of rice include well known methods for rice transformation, such as those described in any of the following: European patent application EP 1198985 A1, Aldemita and Hodges (Planta 199: 612-617, 1996); Chan et al. (Plant Mol Biol 22 (3): 491-506, 1993), Hiei et al. (Plant J 6 (2): 271-282, 1994), which disclosures are incorporated by reference herein as if fully set forth. In the case of corn transformation, the preferred method is as described in either Ishida et al. (Nat. Biotechnol 14(6): 745-50, 1996) or Frame et al. (Plant Physiol 129(1): 13-22, 2002), which disclosures are incorporated by reference herein as if fully set forth. Said methods are further described by way of example in B. Jenes et al., Techniques for Gene Transfer, in: Transgenic Plants, Vol. 1, Engineering and Utilization, eds. S. D. Kung and R. Wu, Academic Press (1993) 128-143 and in Potrykus Annu. Rev. Plant Physiol. Plant Molec. Biol. 42 (1991) 205-225). The nucleic acids or the construct to be expressed is preferably cloned into a vector, which is suitable for transforming Agrobacterium tumefaciens, for example pBin19 (Bevan et al., Nucl. Acids Res. 12 (1984) 8711). Agrobacteria transformed by such a vector can then be used in known manner for the transformation of plants, such as plants used as a model, like Arabidopsis (Arabidopsis thaliana is within the scope of the present invention not considered as a crop plant), or crop plants such as, by way of example, tobacco plants, for example by immersing bruised leaves or chopped leaves in an agrobacterial solution and then culturing them in suitable media. The transformation of plants by means of Agrobacterium tumefaciens is described, for example, by Höfgen and Willmitzer in Nucl. Acid Res. (1988) 16, 9877 or is known inter alia from F. F. White, Vectors for Gene Transfer in Higher Plants; in Transgenic Plants, Vol. 1, Engineering and Utilization, eds. S. D. Kung and R. Wu, Academic Press, 1993, pp. 15-38.

[0115] In addition to the transformation of somatic cells, which then have to be regenerated into intact plants, it is also possible to transform the cells of plant meristems and in particular those cells which develop into gametes. In this case, the transformed gametes follow the natural plant development, giving rise to transgenic plants. Thus, for example, seeds of Arabidopsis are treated with agrobacteria and seeds are obtained from the developing plants of which a certain proportion is transformed and thus transgenic [Feldman, K A and Marks M D (1987). Mol Gen Genet. 208:274-289; Feldmann K (1992). In: C Koncz, N-H Chua and J Shell, eds, Methods in Arabidopsis Research. Word Scientific, Singapore, pp. 274-289]. Alternative methods are based on the repeated removal of the inflorescences and incubation of the excision site in the center of the rosette with transformed agrobacteria, whereby transformed seeds can likewise be obtained at a later point in time (Chang (1994). Plant J. 5: 551-558; Katavic (1994). Mol Gen Genet, 245: 363-370). However, an especially effective method is the vacuum infiltration method with its modifications such as the “floral dip” method. In the case of vacuum infiltration of Arabidopsis, intact plants under reduced pressure are treated with an agrobacterial suspension [Bechthold, N (1993). C R Acad Sci Paris Life Sci, 316: 1194-1199], while in the case of the “floral dip” method the developing floral tissue is incubated briefly with a surfactant-treated agrobacterial suspension [Clough, S J and Bent A F (1998) The Plant J. 16, 735-743]. A certain proportion of transgenic seeds are harvested in both cases, and these seeds can be distinguished from non-transgenic seeds by growing under the above-described selective conditions. In addition the stable transformation of plastids is of advantages because plastids are inherited maternally is most crops reducing or eliminating the risk of transgene flow through pollen. The transformation of the chloroplast genome is generally achieved by a process which has been schematically displayed in Klaus et al., 2004 [Nature Biotechnology 22 (2), 225-229]. Briefly the sequences to be transformed are cloned together with a selectable marker gene between flanking sequences homologous to the chloroplast genome. These homologous flanking sequences direct site specific integration into the plastome. Plastidal transformation has been described for many different plant species and an overview is given in Bock (2001) Transgenic plastids in basic research and plant biotechnology. J Mol. Biol. 2001 Sep. 21; 312 (3):425-38 or Maliga, P (2003) Progress towards commercialization of plastid transformation technology. Trends Biotechnol. 21, 20-28. Further biotechnological progress has recently been reported in form of marker free plastid transformants, which can be produced by a transient co-integrated maker gene (Klaus et al., 2004, Nature Biotechnology 22(2), 225-229).

### T-DNA Activation Tagging

[0116] T-DNA activation tagging (Hayashi et al. Science (1992) 1350-1353), involves insertion of T-DNA, usually containing a promoter (may also be a translation enhancer or an intron), in the genomic region of the gene of interest or 10 kb up- or downstream of the coding region of a gene in a configuration such that the promoter directs expression of the targeted gene. Typically, regulation of expression of the targeted gene by its natural promoter is disrupted and the gene falls under the control of the newly introduced promoter. The promoter is typically embedded in a T-DNA. This T-DNA is randomly inserted into the plant genome, for example, through Agrobacterium infection and leads to modified expression of genes near the inserted T-DNA. The resulting transgenic plants show dominant phenotypes due to modified expression of genes close to the introduced promoter.

### Tilling

[0117] The term “TILLING” is an abbreviation of “Targeted Induced Local Lesions In Genomes” and refers to a mutagenesis technology useful to generate and/or identify nucleic acids encoding proteins with modified expression and/or activity. TILLING also allows selection of plants carrying such mutant variants. These mutant variants may exhibit modified expression, either in strength or in location or in timing (if the mutations affect the promoter for example). These mutant variants may exhibit higher activity than that exhibited by the gene in its natural form. TILLING combines high-density mutagenesis with high-throughput screening methods. The steps typically followed in TILLING are: (a) EMS mutagenesis (Redei G P and Koncz C (1992) In Methods in Arabidopsis Research, Koncz C, Chua N H, Schell J, eds. Singapore, World Scientific Publishing Co, pp. 16-82; Feldmann et al., (1994) In Meyerowitz E M, Somerville C R, eds, Arabidopsis. Cold Spring Harbor Laboratory Press, Cold Spring Harbor, N.Y., pp 137-172; Lightner J and Caspar T (1998) In J Martinez-Zapater, J Salinas, eds, Methods on Molecular Biology, Vol. 82. Humana Press, Totowa, N.J., pp 91-104); (b) DNA preparation and pooling of individuals; (c) PCR amplification of a region of interest; (d) denaturation and annealing to allow formation of heteroduplexes; (e) DHPLC, where the presence of a heteroduplex in a pool is detected as an extra peak in the chromatogram; (f) identification of the mutant individual; and (g) sequencing of the mutant PCR product. Methods for TILLING are well known in the art (McCallum et al., (2000) Nat Biotechnol 18: 455-457; reviewed by Stemple (2004) Nat Rev Genet. 5(2): 145-50).

### Homologous Recombination

[0118] Homologous recombination allows introduction in a genome of a selected nucleic acid at a defined selected position. Homologous recombination is a standard technology used routinely in biological sciences for lower organisms such as yeast or the moss Physcomitrella. Methods for performing homologous recombination in plants have been described not only for model plants (Offringa et al. (1990) EMBO J. 9(10): 3077-84) but also for crop plants, for example rice (Terada et al. (2002) Nat Biotech 20(10): 1030-4; lida and Terada (2004) Curr Opin Biotech 15(2): 132-8), and approaches exist that are generally applicable regardless of the target organism (Miller et al, Nature Biotechnol. 25, 778-785, 2007).

### Yield

[0119] The term “yield” in general means a measurable produce of economic value, typically related to a specified crop, to an area, and to a period of time. Individual plant parts directly contribute to yield based on their number, size and/or weight, or the actual yield is the yield per square meter for a crop and year, which is determined by dividing total production (includes both harvested and appraised production) by planted square meters. The term “yield” of a plant may relate to vegetative biomass (root and/or shoot biomass), to reproductive organs, and/or to propagules (such as seeds) of that plant.

### Early Vigour

[0120] “Early vigour” refers to active healthy well-balanced growth especially during early stages of plant growth, and may result from increased plant fitness due to, for example, the plants being better adapted to their environment (i.e. optimizing the use of energy resources and partitioning between shoot and root). Plants having early vigour also show increased seedling survival and a better establishment of the crop, which often results in highly uniform fields (with the crop growing in uniform manner, i.e. with the majority of plants reaching the various stages of development at substantially the same time), and often better and higher yield. Therefore, early vigour may be determined by measuring various factors, such as thousand kernel weight, percentage germination, percentage emergence, seedling growth, seedling height, root length, root and shoot biomass and many more.

### Increase/Improve/Enhance

[0121] The terms “increase”, “improve” or “enhance” are interchangeable and shall mean in the sense of the application at least a 3%, 4%, 5%, 6%, 7%, 8%, 9%, or 10%, preferably at least 15% or 20%, more preferably 25%, 30%, 35% or 40% more yield and/or growth in comparison to control plants as defined herein.

### Seed Yield

[0122] Increased seed yield may manifest itself as one or more of the following: a) an increase in seed biomass (total seed weight) which may be on an individual seed basis and/or per plant and/or per square meter; b) increased number of flowers per plant; c) increased number of (filled) seeds; d) increased seed filling rate (which is expressed as the ratio between the number of filled seeds divided by the total number of seeds); e) increased harvest index, which is expressed as a ratio of the yield of harvestable parts, such as seeds, divided by the total biomass; and f) increased thousand kernel weight (TKW), and g) increased number of primary panicles, which is extrapolated from the number of filled seeds counted and their total weight. An increased TKW may result from an increased seed size and/or seed weight, and may also result from an increase in embryo and/or endosperm size.

[0123] An increase in seed yield may also be manifested as an increase in seed size and/or seed volume. Furthermore, an increase in seed yield may also manifest itself as an increase in seed area and/or seed length and/or seed width and/or seed perimeter. Increased seed yield may also result in modified architecture, or may occur because of modified architecture.

### Greenness Index

[0124] The “greenness index” as used herein is calculated from digital images of plants. For each pixel belonging to the plant object on the image, the ratio of the green value versus the red value (in the RGB model for encoding color) is calculated. The greenness index is expressed as the percentage of pixels for which the green-to-red ratio exceeds a given threshold. Under normal growth conditions, under salt stress growth conditions, and under reduced nutrient availability growth conditions, the greenness index of plants is measured in the last imaging before flowering. In contrast, under drought stress growth conditions, the greenness index of plants is measured in the first imaging after drought.

### Plant

[0125] The term “plant” as used herein encompasses whole plants, ancestors and progeny of the plants and plant parts, including seeds, shoots, stems, leaves, roots (including tubers), flowers, and tissues and organs, wherein each of the aforementioned comprise the gene/nucleic acid of interest. The term “plant” also encompasses plant cells, suspension cultures, callus tissue, embryos, meristematic regions, gametophytes, sporophytes, pollen and microspores, again wherein each of the aforementioned comprises the gene/nucleic acid of interest.

[0126] Plants that are particularly useful in the methods of the invention include all plants which belong to the superfamily Viridiplantae, in particular monocotyledonous and dicotyledonous plants including fodder or forage legumes, ornamental plants, food crops, trees or shrubs selected from the list comprising Acer spp., Actinidia spp., Abelmoschus spp., Agave sisalana, Agropyron spp., Agrostis stolonifera, Allium spp., Amaranthus spp., Ammophila arenaria, Ananas comosus, Annona spp., Apium graveolens, Arachis spp, Artocarpus spp., Asparagus officinalis, Avena spp. (e.g. Avena sativa, Avena fatua, Avena byzantina, Avena fatua var. sativa, Avena hybrida), Averrhoa carambola, Bambusa sp., Benincasa hispida, Bertholletia excelsea, Beta vulgaris, Brassica spp. (e.g. Brassica napus, Brassica rapa ssp. [canola, oilseed rape, turnip rape]), Cadaba farinosa, Camellia sinensis, Canna indica, Cannabis sativa, Capsicum spp., Carex elata, Carica papaya, Carissa macrocarpa, Carya spp., Carthamus tinctorius, Castanea spp., Ceiba pentandra, Cichorium endivia, Cinnamomum spp., Citrullus lanatus, Citrus spp., Cocos spp., Coffea spp., Colocasia esculenta, Cola spp., Corchorus sp., Coriandrum sativum, Corylus spp., Crataegus spp., Crocus sativus, Cucurbita spp., Cucumis spp., Cynara spp., Daucus carota, Desmodium spp., Dimocarpus longan, Dioscorea spp., Diospyros spp., Echinochloa spp., Elaeis (e.g. Elaeis guineensis, Elaeis oleifera), Eleusine coracana, Eragrostis tef, Erianthus sp., Eriobotrya japonica, Eucalyptus sp., Eugenia uniflora, Fagopyrum spp., Fagus spp., Festuca arundinacea, Ficus carica, Fortunella spp., Fragaria spp., Ginkgo biloba, Glycine spp. (e.g. Glycine max, Soja hispida or Soja max), Gossypium hirsutum, Helianthus spp. (e.g. Helianthus annuus), Hemerocallis fulva, Hibiscus spp., Hordeum spp. (e.g. Hordeum vulgare), Ipomoea batatas, Juglans spp., Lactuca sativa, Lathyrus spp., Lens culinaris, Linum usitatissimum, Litchi chinensis, Lotus spp., Luffa acutangula, Lupinus spp., Luzula sylvatica, Lycopersicon spp. (e.g. Lycopersicon esculentum, Lycopersicon lycopersicum, Lycopersicon pyriforme), Macrotyloma spp., Malus spp., Malpighia emarginata, Mammea americana, Mangifera indica, Manihot spp., Manilkara zapota, Medicago sativa, Melilotus spp., Mentha spp., Miscanthus sinensis, Momordica spp., Morus nigra, Musa spp., Nicotiana spp., Olea spp., Opuntia spp., Ornithopus spp., Oryza spp. (e.g. Oryza sativa, Oryza latifolia), Panicum miliaceum, Panicum virgatum, Passiflora edulis, Pastinaca sativa, Pennisetum sp., Persea spp., Petroselinum crispum, Phalaris arundinacea, Phaseolus spp., Phleum pratense, Phoenix spp., Phragmites australis, Physalis spp., Pinus spp., Pistacia vera, Pisum spp., Poa spp., Populus spp., Prosopis spp., Prunus spp., Psidium spp., Punica granatum, Pyrus communis, Quercus spp., Raphanus sativus, Rheum rhabarbarum, Ribes spp., Ricinus communis, Rubus spp., Saccharum spp., Salix sp., Sambucus spp., Secale cereale, Sesamum spp., Sinapis sp., Solanum spp. (e.g. Solanum tuberosum, Solanum integrifolium or Solanum lycopersicum), Sorghum bicolor, Spinacia spp., Syzygium spp., Tagetes spp., Tamarindus indica, Theobroma cacao, Trifolium spp., Tripsacum dactyloides, Triticale sp., Triticosecale rimpaui, Triticum spp. (e.g. Triticum aestivum, Triticum durum, Triticum turgidum, Triticum hybernum, Triticum macha, Triticum sativum, Triticum monococcum or Triticum vulgare), Tropaeolum minus, Tropaeolum majus, Vaccinium spp., Vicia spp., Vigna spp., Viola odorata, Vitis spp., Zea mays, Zizania palustris, Ziziphus spp., amongst others.

### DETAILED DESCRIPTION OF THE INVENTION

[0127] Surprisingly, it has now been found that modulating expression in a plant of a nucleic acid encoding an MSR polypeptide gives plants having enhanced yield-related traits relative to control plants. According to a first embodiment, the present invention provides a method for enhancing yield-related traits in plants relative to control plants, comprising modulating expression in a plant of a nucleic acid encoding an MSR polypeptide and optionally selecting for plants having enhanced yield-related traits.

[0128] Furthermore, surprisingly, it has now been found that modulating expression in a plant of a nucleic acid encoding an Enolase polypeptide gives plants having enhanced yield-related traits relative to control plants. According to a first embodiment, the present invention provides a method for enhancing yield-related traits in plants relative to control plants, comprising modulating expression in a plant of a nucleic acid encoding an Enolase polypeptide.

[0129] Concerning enolase polypeptides, advantageously, the invention also provides hitherto unknown nucleic acid sequences encoding Enolase polypeptides.

[0130] According to a further embodiment of the present invention, there is therefore provided an isolated nucleic acid molecule selected from:
[0131] (i) a nucleic acid represented by any one of SEQ ID NO: 215 and 217;
[0132] (ii) the complement of a nucleic acid represented by any one of SEQ ID NO: 215 and 217;
[0133] (iii) a nucleic acid encoding the polypeptide as represented by any one of SEQ ID NO: 216 and 218, preferably as a result of the degeneracy of the genetic code, said isolated nucleic acid can be derived from a polypeptide sequence as represented by any one of SEQ ID NO: 216 and 218 and further preferably confers enhanced yield-related traits relative to control plants;
[0134] (iv) a nucleic acid having, in increasing order of preference at least 30%, 31%, 32%, 33%, 34%, 35%, 36%, 37%, 38%, 39%, 40%, 41%, 42%, 43%, 44%, 45%, 46%, 47%, 48%, 49%, 50%, 51%, 52%, 53%, 54%, 55%, 56%, 57%, 58%, 59%, 60%, 61%, 62%, 63%, 64%, 65%, 66%, 67%, 68%, 69%, 70%, 71%, 72%, 73%, 74%, 75%, 76%, 77%, 78%, 79%, 80%, 81%, 82%, 83%, 84%, 85%, 86%, 87%, 88%, 89%, 90%, 91%, 92%, 93%, 94%, 95%, 96%, 97%, 98%, or 99% sequence identity with any of the nucleic acid sequences of Table A2 and further preferably conferring enhanced yield-related traits relative to control plants;
[0135] (v) a nucleic acid molecule which hybridizes with a nucleic acid molecule of (i) to (iv) under stringent hybridization conditions and preferably confers enhanced yield-related traits relative to control plants;
[0136] (vi) a nucleic acid encoding a Enolase polypeptide having, in increasing order of preference, at least 50%, 51%, 52%, 53%, 54%, 55%, 56%, 57%, 58%, 59%, 60%, 61%, 62%, 63%, 64%, 65%, 66%, 67%, 68%, 69%, 70%, 71%, 72%, 73%, 74%, 75%, 76%, 77%, 78%, 79%, 80%, 81%, 82%, 83%, 84%, 85%, 86%, 87%, 88%, 89%, 90%, 91%, 92%, 93%, 94%, 95%, 96%, 97%, 98%, or 99% sequence identity to the amino acid sequence represented by any one of SEQ ID NO: 216 and 218 and any of the other amino acid sequences in Table A2 and preferably conferring enhanced yield-related traits relative to control plants.

[0137] According to a further embodiment of the present invention, there is also provided an isolated polypeptide selected from:
[0138] (i) an amino acid sequence represented by any one of SEQ ID NO: 216 and 218;
[0139] (ii) an amino acid sequence having, in increasing order of preference, at least 50%, 51%, 52%, 53%, 54%, 55%, 56%, 57%, 58%, 59%, 60%, 61%, 62%, 63%, 64%, 65%, 66%, 67%, 68%, 69%, 70%, 71%, 72%, 73%, 74%, 75%, 76%, 77%, 78%, 79%, 80%, 81%, 82%, 83%, 84%, 85%, 86%, 87%, 88%, 89%, 90%, 91%, 92%, 93%, 94%, 95%, 96%, 97%, 98%, or 99% sequence identity to the amino acid sequence represented by any one of SEQ ID NO: 24 and 26 and any of the other amino acid sequences in Table A and preferably conferring enhanced yield-related traits relative to control plants.
[0140] (iii) derivatives of any of the amino acid sequences given in (i) or (ii) above.

[0141] Even furthermore, surprisingly, it has now been found that modulating expression in a plant of a nucleic acid encoding a ZAT-like zinc transporter polypeptide gives plants having enhanced yield-related traits relative to control plants. According to a first embodiment, the present invention provides a method for enhancing yield-related traits in plants relative to control plants, comprising modulating expression in a plant of a nucleic acid encoding a ZAT-like zinc transporter polypeptide.

[0142] Yet furthermore, surprisingly, it has now been found that modulating expression in a plant of a nucleic acid encoding a 6-PGDH (6-phosphogluconate dehydrogenase or 6-phosphogluconate dehydrogenase) polypeptide, gives plants having enhanced yield-related traits relative to control plants. According to a first embodiment, the present invention provides a method for enhancing yield-related traits in plants relative to control plants, comprising modulating expression in a plant of a nucleic acid encoding a 6-PGDH polypeptide and optionally selecting for plants having enhanced yield-related traits.

[0143] Concerning MSR polypeptides, a preferred method for modulating (preferably, increasing) expression of a nucleic acid encoding an MSR polypeptide is by introducing and expressing in a plant a nucleic acid encoding an MSR polypeptide. The increase in expression is in increasing order of preference more than 1, 2, 3, 4, 5, 6, 7, 8, 9, 10, 15, 20, 25, 30, 35, 40, 45, 50, 60, 70, 80, 90, 100 times the level of expression of the same and/or the homologous nucleic acid encoding an MSR polypeptide in a control. Methods to measure the expression level of a gene are well known in the art (Sambrook et al. 1989; John Wiley & Sons 1989 and yearly updates).

[0144] Concerning enolase polypeptides, a preferred method for modulating (preferably, increasing) expression of a nucleic acid encoding an Enolase polypeptide is by introducing and expressing in a plant a nucleic acid encoding an Enolase polypeptide.

[0145] Concerning ZAT-like zinc transporter polypeptides, a preferred method for modulating (preferably, increasing) expression of a nucleic acid encoding a ZAT-like zinc transporter polypeptide is by introducing and expressing in a plant a nucleic acid encoding a ZAT-like zinc transporter polypeptide.

[0146] Concerning 6-PGDH polypeptides, a preferred method for modulating (preferably, increasing) expression of a nucleic acid encoding a 6-PGDH polypeptide is by introducing and expressing in a plant a nucleic acid encoding a 6-PGDH polypeptide.

[0147] Concerning MSR polypeptides, any reference hereinafter to a “protein useful in the methods of the invention” is taken to mean an MSR polypeptide as defined herein. Any reference hereinafter to a “nucleic acid useful in the methods of the invention” is taken to mean a nucleic acid capable of encoding such an MSR polypeptide. The nucleic acid to be introduced into a plant (and therefore useful in performing the methods of the invention) is any nucleic acid encoding the type of protein which will now be described, hereafter also named “MSR nucleic acid” or “MSR gene”.

[0148] Concerning enolase polypeptides, any reference hereinafter to a “protein useful in the methods of the invention” is taken to mean an Enolase polypeptide as defined herein. Any reference hereinafter to a “nucleic acid useful in the methods of the invention” is taken to mean a nucleic acid capable of encoding such an Enolase polypeptide. The nucleic acid to be introduced into a plant (and therefore useful in performing the methods of the invention) is any nucleic acid encoding the type of protein which will now be described, hereafter also named “ENOLASE nucleic acid” or “ENOLASE gene”.

[0149] Concerning ZAT-like zinc transporter polypeptides, any reference hereinafter to a “protein useful in the methods of the invention” is taken to mean a ZAT-like zinc transporter polypeptide as defined herein. Any reference hereinafter to a “nucleic acid useful in the methods of the invention” is taken to mean a nucleic acid capable of encoding such a ZAT-like zinc transporter polypeptide. The nucleic acid to be introduced into a plant (and therefore useful in performing the methods of the invention) is any nucleic acid encoding the type of protein which will now be described, hereafter also named “ZAT-like zinc transporter nucleic acid” or “ZAT-like zinc transporter gene”.

[0150] Concerning 6-PGDH polypeptides, any reference hereinafter to a “protein useful in the methods of the invention” is taken to mean a 6-PGDH polypeptide as defined herein. Any reference hereinafter to a “nucleic acid useful in the methods of the invention” is taken to mean a nucleic acid capable of encoding such a 6-PGDH polypeptide. The nucleic acid to be introduced into a plant (and therefore useful in performing the methods of the invention) is any nucleic acid encoding the type of protein which will now be described, hereafter also named “6-PGDH nucleic acid” or “6-PGDH gene”.

[0151] A “MSR polypeptide” as defined herein refers to any polypeptide having in increasing order of preference at least 25%, 26%, 27%, 28%, 29%, 30%, 31%, 32%, 33%, 34%, 35%, 36%, 37%, 38%, 39%, 40%, 41%, 42%, 43%, 44%, 45%, 46%, 47%, 48%, 49%, 50%, 51%, 52%, 53%, 54%, 55%, 56%, 57%, 58%, 59%, 60%, 61%, 62%, 63%, 64%, 65%, 66%, 67%, 68%, 69%, 70%, 71%, 72%, 73%, 74%, 75%, 76%, 77%, 78%, 79%, 80%, 81%, 82%, 83%, 84%, 85%, 86%, 87%, 88%, 89%, 90%, 91%, 92%, 93%, 94%, 95%, 96%, 97%, 98%, 99% or more amino acid sequence identity to any of the polypeptide sequences given in Table A1 herein and preferably having methione sulfoxide reductase activity.

[0152] Preferably an MSR polypeptide useful in the methods of the invention comprises at least one conserved protein motif having in increasing order of preference 50%, 51%, 52%, 53%, 54%, 55%, 56%, 57%, 58%, 59%, 60%, 61%, 62%, 63%, 64%, 65%, 66%, 67%, 68%, 69%, 70%, 71%, 72%, 73%, 74%, 75%, 76%, 77%, 78%, 79%, 80%, 81%, 82%, 83%, 84%, 85%, 86%, 87%, 88%, 89%, 90%, 91%, 92%, 93%, 94%, 95%, 96%, 97%, 98%, 99% or 100% sequence identity to any one of:
[0153] (i) Motif 1 as represented by SEQ ID NO: 173: (Q)(Y)(R)(S)
[0154] (ii) Motif 2 as represented by SEQ ID NO: 174 (Y/H/E/D/G)(H/S)(Q/R) (Q/K/R)(Y/F)(L/C/E)
[0155] (iii) Motif 3 as represented by SEQ ID NO: 175 (I/V)(V/M/I/A/R/F/T)(T/V/R) (E/D/T)(I/V/I/Q)(L/K/A/V/I)(P/G/T/K)(A/S/P/T/Q)
[0156] (iv) Motif 4 as represented by SEQ ID NO: 176 (A/F/T/-)(Q/v/e/s/c/t/-)(F/I/A/-)(G/A/-)(A/L/S/T/-)(G/-)(C/S/-)(F/-)(W/-) (G/R/S/-)(V/S/G/-)(E/-)(L/-)(A/M/G/V/T/-)(F/C/A/Y/-) (Q/W/R/G/-)(R/C/E/-)(V/I/L/S/A/-)(P/H/R/N/S/-)(G/-)(V/L/-)(T/V/I/Y/R/A/-)(K/R/E/S/A/Y/Q/V/-)(T/A/-) (E/S/R/A/-)(V/A/-)(G/-)(Y/-)(T/S/A/V/I/-)(Q/G/A/H/-)(G/-)(N/S/L/H/K/A/D/Q/-)(L/K/S/T/I/V/F/R/M/-(H/T/A/S/Q/K/E/P/D/-)(N/D/H/R/G/E/M-)(P/-)(T/S/L/N/D/-(Y/-)(E/R/K/Y/G/Q/-)(D/A/L/-)(V/E/D/A/I/-)(C/Y/-(T/S/R/H/G/-)(G/N/S/-)(A/L/V/Q/R/K/T/D/M/-)(T/G/A/-(Y/D/G/N/S/K/-)(H/-)(S/A/T/V/N/M)(E/Q)(V/S/F/A/G/C)(V/L/D)(R/Q/E/K/Y)(V/I/L/M)(Q/H/E/T/V/I)(Y/F)(D/N)(P/V/L)(K/R/S/Q/A/N)(A/V/L/I/M/Q/E/D/N)(C/I/V/G)(K/P/K/T/G/Q/H)(Y/F)(D/R/S/K/T/E/Q)(D/Q/K/N/T/V/S)(L/I)(L/V)(D/E/S/A/K)(V/F/I/L/M/A/T)(F/H/L)(W/Y)(A/S/Q/K/T/D/N)(R/K/S/M/N)(H)(D/N)(P/S)(T/R)(T/Q/E/A)(L/P/V/I/G/K/F)(N/F/H/M/D)(R/G)(Q)(G/V)(N/P/G/A/E)(D/L)(V/Q/R/L/S)(G)(T/N/A/S/P)(Q)(Y)(R)(S)(G/V/A/C/I)(I/V/L)(Y/F)(Y/T/F/C)(Y/N/H/Q/T/S)
[0157] wherein the amino acid at each position is given between brackets and - represents a gap, that is, the absence of an amino acid at said position.

[0158] Alternatively an MSR polypeptide useful in the methods of the invention comprises a protein motif having at least in increasing order of preference 50%, 51%, 52%, 53%, 54%, 55%, 56%, 57%, 58%, 59%, 60%, 61%, 62%, 63%, 64%, 65%, 66%, 67%, 68%, 69%, 70%, 71%, 72%, 73%, 74%, 75%, 76%, 77%, 78%, 79%, 80%, 81%, 82%, 83%, 84%, 85%, 86%, 87%, 88%, 89%, 90%, 91%, 92%, 93%, 94%, 95%, 96%, 97%, 98%, or 99% sequence identity to one or more of the following motifs:
[0159] (i) Motif 5 as represented by SEQ ID NO: 177: (G)(W)(P)
[0160] (ii) Motif 6 as represented by SEQ ID NO: 178: (L/V)(Y/F/L) (K/D/E/Q/S/R)(S/T/)(T/S/A/I/L/K/D/-)(T/A/-)(K/-)(F/-) (D/N/-)(S/A/R)(G/P)
[0161] (iii) Motif 7 as represented by SEQ ID NO: 179: (G/D/E/N/-)(G/A/S/I/-)(H/F/-)(L/F/-)(G/F/C/-)(H/F)(V/I/S)(F/T/H/L/V) (K/D/P/M/L/I/R)
[0162] (iv) Motif 8 as represented by SEQ ID NO: 180: (K/R/L/T/W/L/F/I/-)(S/T/R/Q/P/K/G/-)(E/D/N/A/T/K/-)(E/A/Q/A/G/R/-)(E/D/R/-)((W/L/Q/-)(R/K/AN/E/Q/-)(A/V/K/T/Q/R/-)(V/I/Q/R/K/G/-)(L/A/-)(S/T/E/N/-)(P/D/S/Q/A/N/E/K/-)(E/D/Q/A/-)(Q/E/A)(F/Y/R/-)(R/Y/H/K/T/Q/-)(I/V/-)(L/T/A/-)(R/L/-)(Q/K/L/D/R/E/H/-)(K/A/E/H/-)(G/M/S/A)(T/I/S) (E/D/R)(R/A/K/N/Y/T/I/P/F/L)(P/A/K/Q/R/A)(G/F/N)(T/S/K/C)(G/S/E)(E/P/V/R)(Y/F/L) (N/D/W/V/T/L/E)(K/N/Q/D)(F/T/N/V/L/K/E/S)(F/W/Y/K/H/D/S)(T/N/A/G/E/D/K/R)(E/P/A/D/K/Q/V)(G)(I/V/A/T)(Y/F)
[0163] (v) Motif 9 as represented by SEQ ID NO: 181: (C)(A/V/I/R)(G/C/L)(C)(G/A/D/N/K/Q/E) (T/S/A/L/N)(P/A/D/K)(L/V)(Y/F/L)(K/E/D/Q/S/R)(S/-)(T/S/K/D/A/I/L)
[0164] (vi) Motif 10 as represented by SEQ ID NO: 182: (A/S)(F/Y)(F/Y/W/D)(E/Q/D/R/A) (G/P/T/A)(I/V/L/F)(G/P/A/D)(G/A/P/N/D/K/E)(A/N/T)(I/V/H)(N/K/T/G/V/I/A)(R/Q/S/E/T)(T/K/H/I/E/A/S/N)(P/L/R/T/A/M/V/I/E)(D/E/R/I/G/N)(P/L/A/D/R/W/M)(D/E/S/T/A/G/-)(G/I/S/F/H/-)(R/I/F/P/G/H/L/K/M/-)(R/F/S/G/M/-)(M/V/Y/I/T/-)(P/R/V/-)(R/-)(Q/T/-) (E/A/-)(I/V/S/T/-)(T/L/IN/H/N/-)(C/-)
[0165] (vii) Motif 11 as represented by SEQ ID NO: 183: (G/A/S/I/-)(H/F/-)(L/F/-)(G/F/C/-)(H/F) (V/I/S)(F/T/H/L/V)(K/D/P/M/L/I/R) (G/D/N/T/V)(E/G/R/H)(G/P/N/D/W/S) (F/P/H/Y/I/N/R/S)(S/L/P/A/D/G/K/R-)(T/R/N/V/-)(P/D/A/F/T/-)(T/L/F/S/R)(D/G/L/Y/N)(E/K/A/N/Q/L)(R/K/D/E/A/P)(H/Y/I/L/K/C/F)(C/V/-)(V/L/I/S/M/-)(N/Q/K/L/-)(S/L/Q/R/-)(V/I/A/R/Y/-)

[0166] Motifs 1 to 11 further comprise a sequence as represented by SEQ ID NO: 173 to 183 respectively, in which any amino acid residue is substituted by any conservative amino acid residues according to Table 1.

[0167] Motifs 1 to 4 are typically present in MSR polypeptides of the type A, while Motifs 5 to 11 are characteristic of MSR polypeptide of the type B.

[0168] Preferably, the homologue of an MSR protein has in increasing order of preference at least 25%, 26%, 27%, 28%, 29%, 30%, 31%, 32%, 33%, 34%, 35%, 36%, 37%, 38%, 39%, 40%, 41%, 42%, 43%, 44%, 45%, 46%, 47%, 48%, 49%, 50%, 51%, 52%, 53%, 54%, 55%, 56%, 57%, 58%, 59%, 60%, 61%, 62%, 63%, 64%, 65%, 66%, 67%, 68%, 69%, 70%, 71%, 72%, 73%, 74%, 75%, 76%, 77%, 78%, 79%, 80%, 81%, 82%, 83%, 84%, 85%, 86%, 87%, 88%, 89%, 90%, 91%, 92%, 93%, 94%, 95%, 96%, 97%, 98%, or 99% overall sequence identity to the amino acid represented by SEQ ID NO: 2 or SEQ ID NO: 102, provided that the homologous protein comprises a conserved motifs as outlined above. The overall sequence identity is determined using a global alignment algorithm, such as the Needleman Wunsch algorithm in the program GAP (GCG Wisconsin Package, Accelrys), preferably with default parameters and preferably with sequences of mature proteins (i.e. without taking into account secretion signals or transit peptides). Compared to overall sequence identity, the sequence identity will generally be higher when only conserved domains or motifs are considered.

[0169] A Methione Sulfoxide Reductase Enzyme having the systematic name “peptide-L-methionine:thioredoxin-disulfide S-oxidoreductase [L-methionine (S)—S-oxide-forming]” catalyses the reduction of peptides having oxidised methione residues mediated by thioredoxin. MSR enzymes are able to catalyze any of the following reactions:

peptide-L-methionine (S)—S-oxide+thioredoxin=peptide-L-methionine+thioredoxin disulfide+H₂O (1)

L-methionine (S)—S-oxide+thioredoxin=L-methionine+thioredoxin disulfide+H2O (2)

[0170] Preferably, the MSR polypeptide sequence useful in the methods of the invention is a polypeptide which when used in the construction of a phylogenetic tree, such as the one depicted in FIG. 2 of Rouhier et al. 2006, clusters with the group of AtMSRB1 or OsMSRA4 polypeptides rather than with any other group.

[0171] An “Enolase polypeptide” as defined herein refers to any polypeptide comprising a protein domain having in increasing order of preference at least 50%, 51%, 52%, 53%, 54%, 55%, 56%, 57%, 58%, 59%, 60%, 61%, 62%, 63%, 64%, 65%, 66%, 67%, 68%, 69%, 70%, 71%, 72%, 73%, 74%, 75%, 76%, 77%, 78%, 79%, 80%, 81%, 82%, 83%, 84%, 85%, 86%, 87%, 88%, 89%, 90%, 91%, 92%, 93%, 94%, 95%, 96%, 97%, 98%, 99% or 100% amino acid sequence identity to (i) a Conserved Enolase N Domain as represented by SEQ ID NO: 235 with a Pfam accession PF00113 and to (ii) a Conserved Enolase C Domain as represented by SEQ ID NO: 236 with a Pfam accession PF03952 and optionally having Enolase (2-phospho-D-glycerate hydro-lyase) activity.

[0172] Additionally, an “Enolase polypeptide” as defined herein preferably comprises one or more of the following protein motifs (i) SIE(D/Q)PFD (SEQ ID NO: 237); (ii) VGDDLL (SEQ ID NO: 238); (iii) GAPCR (SEQ ID NO: 239); and KYNQ(L/I)LRIE (SEQ ID NO: 240); wherein any amino acid may be substituted by a conservative amino acid according to Table 1.

[0173] Further preferably an “Enolase polypeptide” useful in the methods of the invention comprises one or more protein signatures having in increasing order of preference at least 50%, 51%, 52%, 53%, 54%, 55%, 56%, 57%, 58%, 59%, 60%, 61%, 62%, 63%, 64%, 65%, 66%, 67%, 68%, 69%, 70%, 71%, 72%, 73%, 74%, 75%, 76%, 77%, 78%, 79%, 80%, 81%, 82%, 83%, 84%, 85%, 86%, 87%, 88%, 89%, 90%, 91%, 92%, 93%, 94%, 95%, 96%, 97%, 98%, 99% or 100% sequence identity to:
[0174] (i) amino acids residues 38-52 of SEQ ID NO: 194;
[0175] (ii) amino acids residues 113-129 of SEQ ID NO: 194;
[0176] (iii) amino acids residues 170-183 of SEQ ID NO: 194;
[0177] (iv) amino acids residues 328-339 of SEQ ID NO: 194;
[0178] (v) amino acids residues 351-365 of SEQ ID NO: 194; and
[0179] (vi) amino acids residues 380-397 of SEQ ID NO: 194;
   wherein any amino acid residue may be substituted by a conservative amino acid according to Table 1.

[0180] The protein signatures mentioned above from (i) to (Vi) correspond to the 6-element fingerprint which typically provides a signature for Enolases. The elements abovementioned has accession number PR00148 in PRINTS-S database (PRINTS-S Version 16 modelled on PRINTS Version 38.0, Attwood et al. 2003 Nucleic Acids Research, 31(1), 400-402). Such signatures may be identified using tools and methods well known in the art such as SPRINT, a Web tool developed and maintain by Attwood and colleagues at the Faculty of Life Sciences in The University of Manchester, Manchester M13 9PT, UK. Alternatively, the signatures may be identified searching in databases containin conserved protein sequences or domains, or motifs or signatures, protein alignments, for example using Interpro. Further details are provided in the Examples section.

[0181] In one embodiment of the invention the Enolase polypeptide comprises one or more protein domains having in increasing order of preference at least 50%, 51%, 52%, 53%, 54%, 55%, 56%, 57%, 58%, 59%, 60%, 61%, 62%, 63%, 64%, 65%, 66%, 67%, 68%, 69%, 70%, 71%, 72%, 73%, 74%, 75%, 76%, 77%, 78%, 79%, 80%, 81%, 82%, 83%, 84%, 85%, 86%, 87%, 88%, 89%, 90%, 91%, 92%, 93%, 94%, 95%, 96%, 97%, 98%, or 99% sequence identity to:
[0182] (i) SEQ ID NO: 245 which corresponds to the conserved DNA binding domain;
[0183] (ii) SEQ ID NO: 246 which corresponds to the conserved repressor domain.

[0184] Typically an Enolase polypeptide has Enolase activity (2-phospho-D-glycerate hydro-lyase) corresponding to IntEnz (Integrated relational Enzyme database, Fleischmann et al. 2004 Nucleic Acids Res. 32, D434-D437) classification number of EC: 4.2.1.11. The enzyme Enolase catalizes the reaction 2-phospho-D-glycerate=phosphoenolpyruvate+H₂O.

[0185] Other accepted terms in the art for referring to an Enolase enzyme are phosphopyruvate hydratase and 14-3-2-protein, 2-phosphoglycerate dehydratase, 2-phosphoglycerate Enolase, 2-phosphoglyceric dehydratase and γ-Enolase, phosphoenolpyruvate hydratase and 2-phospho-D-glycerate hydro-lyase.

[0186] Alternatively, an Enolase protein and a homologue thereof has in increasing order of preference at least 25%, 26%, 27%, 28%, 29%, 30%, 31%, 32%, 33%, 34%, 35%, 36%, 37%, 38%, 39%, 40%, 41%, 42%, 43%, 44%, 45%, 46%, 47%, 48%, 49%, 50%, 51%, 52%, 53%, 54%, 55%, 56%, 57%, 58%, 59%, 60%, 61%, 62%, 63%, 64%, 65%, 66%, 67%, 68%, 69%, 70%, 71%, 72%, 73%, 74%, 75%, 76%, 77%, 78%, 79%, 80%, 81%, 82%, 83%, 84%, 85%, 86%, 87%, 88%, 89%, 90%, 91%, 92%, 93%, 94%, 95%, 96%, 97%, 98%, or 99% overall sequence identity to the amino acid represented by SEQ ID NO: 194, provided that the homologous protein comprises the conserved Enolase N and Enolase C domains as outlined above. The overall sequence identity is determined using a global alignment algorithm, such as the Needleman Wunsch algorithm in the program GAP (GCG Wisconsin Package, Accelrys), preferably with default parameters and preferably with sequences of mature proteins (i.e. without taking into account secretion signals or transit peptides). Compared to overall sequence identity, the sequence identity will generally be higher when only conserved domains or motifs are considered.

[0187] Preferably, the polypeptide sequence which when used in the construction of a phylogenetic tree, such as the one depicted in FIG. 4, clusters with any of the Enolase polypeptides in the tree rather than falling outside of the clades and therefore constituting an outgroup.

[0188] A “ZAT-like zinc transporter polypeptide” as defined herein refers to any polypeptide comprising in increasing order of preference at least 50%, 51%, 52%, 53%, 54%, 55%, 56%, 57%, 58%, 59%, 60%, 61%, 62%, 63%, 64%, 65%, 66%, 67%, 68%, 69%, 70%, 71%, 72%, 73%, 74%, 75%, 76%, 77%, 78%, 79%, 80%, 81%, 82%, 83%, 84%, 85%, 86%, 87%, 88%, 89%, 90%, 91%, 92%, 93%, 94%, 95%, 96%, 97%, 98%, or 99% overall sequence identity to the amino acid represented by SEQ ID NO: 248. The overall sequence identity is determined using a global alignment algorithm, such as the Needleman Wunsch algorithm in the program GAP (GCG Wisconsin Package, Accelrys), preferably with default parameters and preferably with sequences of mature proteins (i.e. without taking into account secretion signals or transit peptides). Compared to overall sequence identity, the sequence identity will generally be higher when only conserved domains or motifs are considered.

[0189] Preferably, the polypeptide sequence which when used in the construction of a phylogenetic tree, such as the one depicted in FIG. 7, clusters with the group of ZAT-like zinc transporter polypeptides comprising the amino acid sequence represented by SEQ ID NO: 248 rather than with any other group.

[0190] A “6-PGDH polypeptide” as defined herein refers to a 6-phosphogluconate dehydrogenase (6-PGDH). 6-PGDH protein belong to the Enzyme class: EC1.1.1.44. Its chemical composition and biochemical properties are well known in the art (Sundaramoorthy et al. 2007 FEBS J. 2007 January; 274(1):275-86; Huang et al. 2003 Mol Biol Rep 30(4):223-7; Krepeinsky eta l. 2001 Eur J. Biochem. May; 268(9):2678-86.

[0191] Alternatively, a “6-PGDH polypeptide” as defined herein refers the proteins represented by SEQ ID NO: 2, and to orthologues, paralogues, and homologues thereof. Preferred homologues, including orthologues and paralogues useful in the methods of the invention are described in Table A4.

[0192] Preferably, a 6-PGDH protein of the invention, in particular the orthologues, paralogues, and homologues of SEQ ID NO: 281 have a 6-phosphogluconate dehydrogenase domain with Interpro accession number IPR006115 or Pfam accession number PF03446. More preferably the 6-PGDH polypeptide useful in the methods of the invention comprise a protein domain having 50%, 51%, 52%, 53%, 54%, 55%, 56%, 57%, 58%, 59%, 60%, 61%, 62%, 63%, 64%, 65%, 66%, 67%, 68%, 69%, 70%, 71%, 72%, 73%, 74%, 75%, 76%, 77%, 78%, 79%, 80%, 81%, 82%, 83%, 84%, 85%, 86%, 87%, 88%, 89%, 90%, 91%, 92%, 93%, 94%, 95%, 96%, 97%, 98%, 99% or 100% sequence identity to the amino acid represented by the SEQ ID NO: 282 which represents the 6-phosphogluconate dehydrogenase domain comprise in SEQ ID NO: 281 between amino acid position 3 to 178.

[0193] Furthermore preferably, a 6-PGDH protein of the invention, in particular the orthologues, paralogues, and homologues of SEQ ID NO: 281 have a conserved 6-phosphogluconate dehydrogenase C-terminal domain with Interpro accession number IPR006114 or Pfam accession number PF0393 (see Examples section). More preferably the 6-PGDH polypeptide useful in the methods of the invention comprise a protein domain having 50%, 51%, 52%, 53%, 54%, 55%, 56%, 57%, 58%, 59%, 60%, 61%, 62%, 63%, 64%, 65%, 66%, 67%, 68%, 69%, 70%, 71%, 72%, 73%, 74%, 75%, 76%, 77%, 78%, 79%, 80%, 81%, 82%, 83%, 84%, 85%, 86%, 87%, 88%, 89%, 90%, 91%, 92%, 93%, 94%, 95%, 96%, 97%, 98%, 99% or 100% sequence identity to the amino acid located between amino acid position 182 and 472 of SEQ ID NO: 281, which corresponds to the C-terminal domain of the 6-phosphogluconate dehydrogenase of SEQ ID NO: 281.

[0194] A further preferred 6-PGDH polypeptide useful in the methods of the invention has an aspartic amino acid residue at a position equivalent to D255 of SEQ ID NO: 281 or at position D253 in the L. lactis 6-PGDH enzyme (Sundaramoorthy et al; 2007). FIG. 9 shows an alignment of 6-PGDH polypeptide where the equivalent amino acids to D255 in several 6-PGDH polypeptide are shown.

[0195] Methods to identify the equivalent amino acids between 6-PGDH polypeptides at a given position are well known in the art. For example the polypeptide may be compared to the motif by aligning their respective amino acid sequence to identify regions with similar sequence using a suitable alignment algorithm such as BLAS (Altschul et al. J Mol Biol 215: 403-10).

[0196] Alternatively or additionally, a “6-PGDH polypeptide” as defined herein refers to any polypeptide having in increasing order of preference at least 50%, 51%, 52%, 53%, 54%, 55%, 56%, 57%, 58%, 59%, 60%, 61%, 62%, 63%, 64%, 65%, 66%, 67%, 68%, 69%, 70%, 71%, 72%, 73%, 74%, 75%, 76%, 77%, 78%, 79%, 80%, 81%, 82%, 83%, 84%, 85%, 86%, 87%, 88%, 89%, 90%, 91%, 92%, 93%, 94%, 95%, 96%, 97%, 98%, 99% or 100% amino acid sequence identity to the 6-PGDH polypeptide as represented by SEQ ID NO: 281 or any one of the polypeptides of Table A4.

[0197] The terms “domain”, “signature” and “motif” are defined in the “definitions” section herein. Specialist databases exist for the identification of domains, for example, SMART (Schultz et al. (1998) Proc. Natl. Acad. Sci. USA 95, 5857-5864; Letunic et al. (2002) Nucleic Acids Res 30, 242-244), InterPro (Mulder et al., (2003) Nucl. Acids. Res. 31, 315-318), Prosite (Bucher and Bairoch (1994), A generalized profile syntax for biomolecular sequences motifs and its function in automatic sequence interpretation. (In) ISMB-94; Proceedings 2nd International Conference on Intelligent Systems for Molecular Biology. Altman R., Brutlag D., Karp P., Lathrop R., Searls D., Eds., pp 53-61, AAAI Press, Menlo Park; Hulo et al., Nucl. Acids. Res. 32:D134-D137, (2004)), or Pfam (Bateman et al., Nucleic Acids Research 30(1): 276-280 (2002)). A set of tools for in silico analysis of protein sequences is available on the ExPASy proteomics server (Swiss Institute of Bioinformatics (Gasteiger et al., ExPASy: the proteomics server for in-depth protein knowledge and analysis, Nucleic Acids Res. 31:3784-3788 (2003)). Domains or motifs may also be identified using routine techniques, such as by sequence alignment.

[0198] Concerning MSR polypeptides, alternatively, a conserved motif may also be identified simply by eye inspection of a multiple sequence alignment, for example of the polypeptide sequence of Table A1, and as shown in FIG. 3.

[0199] Methods for the alignment of sequences for comparison are well known in the art, such methods include GAP, BESTFIT, BLAST, FASTA and TFASTA. GAP uses the algorithm of Needleman and Wunsch ((1970) J Mol Biol 48: 443-453) to find the global (i.e. spanning the complete sequences) alignment of two sequences that maximizes the number of matches and minimizes the number of gaps. The BLAST algorithm (Altschul et al. (1990) J Mol Biol 215: 403-10) calculates percent sequence identity and performs a statistical analysis of the similarity between the two sequences. The software for performing BLAST analysis is publicly available through the National Centre for Biotechnology Information (NCBI). Homologues may readily be identified using, for example, the ClustalW multiple sequence alignment algorithm (version 1.83), with the default pairwise alignment parameters, and a scoring method in percentage. Global percentages of similarity and identity may also be determined using one of the methods available in the MatGAT software package (Campanella et al., BMC Bioinformatics. 2003 Jul. 10; 4:29. MatGAT: an application that generates similarity/identity matrices using protein or DNA sequences.). Minor manual editing may be performed to optimise alignment between conserved motifs, as would be apparent to a person skilled in the art. Furthermore, instead of using full-length sequences for the identification of homologues, specific domains may also be used. The sequence identity values may be determined over the entire nucleic acid or amino acid sequence or over selected domains or conserved motif(s), using the programs mentioned above using the default parameters. For local alignments, the Smith-Waterman algorithm is particularly useful (Smith T F, Waterman M S (1981) J. Mol. Biol. 147(1); 195-7).

[0200] Furthermore, MSR polypeptides (at least in their native form) typically have methione sulfoxide reductase activity. Tools and techniques for measuring MSR activity are well known in the art. For example MSR activity may be assayed in vitro with either a protein substrate (oxidized α-1 protease inhibitor) or a synthetic substrate (N-acetyl-[3H]-MetSO) as described by Sadanadom et al. Plant Physiol. 2000; 123(1): 255-264 or Boschi-Muller et al; 2008 and references therein or Vieira-Dos Santos et al Plant Physiol. 2005, 138(2):909-22.

[0201] In addition, MSR polypeptides, when expressed in rice according to the methods of the present invention as outlined in the example section, give plants having increased yield-related traits selected from: early vigour, total seed weight, number of filled seeds and harvest index.

[0202] Furthermore, ENOLASE polypeptides (at least in their native form) typically have 2-phospho-D-glycerate hydro-lyase activity (Enolase activity). Tools and techniques for measuring Enolase activity are well known in the art. Activity of an Enolase polypeptide may be determined in an in vivo assay by complementation of the E. coli strain defective in Enolase function as described by Lal et al. 1991. Plant Mol. Biol. 16(5):787-95. Alternatively, Enolase activity may be determined in an in vitro assay as for examples described by Eigembrod et al; 1983 EMBO J. 1983; 2(9): 1565-1570 and/or Geige 2003; The Plant Cell, Vol. 15, 2140-2151. Alternatively, the activity of an enolase nucleic acid and the protein encoded thereof may be determined by assaying the DNA binding ability of the protein to the c-myc promoter or to the promoter of the zinc finger STZ/ZAT10 from Arabidopsis in cells transformed with a vector comprising the enolase nucleic acid as described by Lee et al. 2002.

[0203] In addition, ENOLASE polypeptides, when expressed in rice according to the methods of the present invention as outlined in the Example section, give plants having increased yield related traits, in particular one or more traits selected from: harvest index, seed filling rate, total seed yield, and number of filled seeds.

[0204] Furthermore, ZAT-like zinc transporter polypeptides (at least in their native form) typically have zinc transporter activity. Furthermore, the introduction into a plant of any nucleic acid encoding a ZAT-like zinc transporter polypeptide leads to the generation of plants having increased yield, especially seed yield.

[0205] Furthermore, 6-PGDH polypeptides (at least in their native form), as far as SEQ ID NO: 2 and its homologues are concerned; preferably have 6-Phosphogluconate dehydrogenase (EC 1.1.1.44). Tools and techniques for measuring DNA binding activity are well known in the art.

[0206] Concerning MSR polypeptides, the present invention is illustrated by transforming plants with the nucleic acid sequence represented by SEQ ID NO: 1 and by SEQ ID NO: 101 encoding the polypeptide sequence of SEQ ID NO: 2 and SEQ ID NO: 102 respectively. However, performance of the invention is not restricted to these sequences; the methods of the invention may advantageously be performed using any MSR-encoding nucleic acid or MSR polypeptide as defined herein.

[0207] Examples of nucleic acids encoding MSR polypeptides are given in Table A1 of The Examples section herein. Such nucleic acids are useful in performing the methods of the invention. The amino acid sequences given in Table A1 of The Examples section are example sequences of orthologues and paralogues of the MSR polypeptide represented by SEQ ID NO: 2 or SEQ ID NO: 102, the terms “orthologues” and “paralogues” being as defined herein. Further orthologues and paralogues may readily be identified by performing a so-called reciprocal blast search. Typically, this involves a first BLAST involving BLASTing a query sequence (for example using any of the sequences listed in Table A1 of The Examples section) against any sequence database, such as the publicly available NCBI database. BLASTN or TBLASTX (using standard default values) are generally used when starting from a nucleotide sequence, and BLASTP or TBLASTN (using standard default values) when starting from a protein sequence. The BLAST results may optionally be filtered. The full-length sequences of either the filtered results or non-filtered results are then BLASTed back (second BLAST) against sequences from the organism from which the query sequence is derived (where the query sequence is SEQ ID NO: 1 or SEQ ID NO: 2, the second BLAST would therefore be against rice sequences). The results of the first and second BLASTs are then compared. A paralogue is identified if a high-ranking hit from the first blast is from the same species as from which the query sequence is derived, a BLAST back then ideally results in the query sequence amongst the highest hits; an orthologue is identified if a high-ranking hit in the first BLAST is not from the same species as from which the query sequence is derived, and preferably results upon BLAST back in the query sequence being among the highest hits.

[0208] Concerning enolase polypeptides, the present invention is illustrated by transforming plants with the nucleic acid sequence represented by SEQ ID NO: 193, encoding the polypeptide sequence of SEQ ID NO: 194. However, performance of the invention is not restricted to these sequences; the methods of the invention may advantageously be performed using any ENOLASE-encoding nucleic acid or ENOLASE polypeptide as defined herein.

[0209] Examples of nucleic acids encoding ENOLASE polypeptides are given in Table A2 of The Examples section herein. Such nucleic acids are useful in performing the methods of the invention. The amino acid sequences given in Table A2 of The Examples section are example sequences of orthologues and paralogues of the ENOLASE polypeptide represented by SEQ ID NO: 194, the terms “orthologues” and “paralogues” being as defined herein. Further orthologues and paralogues may readily be identified by performing a so-called reciprocal blast search. Typically, this involves a first BLAST involving BLASTing a query sequence (for example using any of the sequences listed in Table A2 of The Examples section) against any sequence database, such as the publicly available NCBI database. BLASTN or TBLASTX (using standard default values) are generally used when starting from a nucleotide sequence, and BLASTP or TBLASTN (using standard default values) when starting from a protein sequence. The BLAST results may optionally be filtered. The full-length sequences of either the filtered results or non-filtered results are then BLASTed back (second BLAST) against sequences from the organism from which the query sequence is derived (where the query sequence is SEQ ID NO: 193 or SEQ ID NO: 194, the second BLAST would therefore be against rice sequences). The results of the first and second BLASTs are then compared. A paralogue is identified if a high-ranking hit from the first blast is from the same species as from which the query sequence is derived, a BLAST back then ideally results in the query sequence amongst the highest hits; an orthologue is identified if a high-ranking hit in the first BLAST is not from the same species as from which the query sequence is derived, and preferably results upon BLAST back in the query sequence being among the highest hits.

[0210] Concerning ZAT-like zinc transporter polypeptides, the present invention is illustrated by transforming plants with the nucleic acid sequence represented by SEQ ID NO: 246, encoding the polypeptide sequence of SEQ ID NO: 248. However, performance of the invention is not restricted to these sequences; the methods of the invention may advantageously be performed using any nucleic acid encoding a ZAT-like zinc transporter polypeptide as defined herein.

[0211] Examples of nucleic acids encoding ZAT-like zinc transporter polypeptides are given in Table A3 of Example 1 herein. Such nucleic acids are useful in performing the methods of the invention. The amino acid sequences given in Table A3 of Example 1 are example sequences of orthologues and paralogues of the ZAT-like zinc transporter polypeptide represented by SEQ ID NO: 248, the terms “orthologues” and “paralogues” being as defined herein. Further orthologues and paralogues may readily be identified by performing a so-called reciprocal blast search. Typically, this involves a first BLAST involving BLASTing a query sequence (for example using any of the sequences listed in Table A3 of Example 1) against any sequence database, such as the publicly available NCBI database. BLASTN or TBLASTX (using standard default values) are generally used when starting from a nucleotide sequence, and BLASTP or TBLASTN (using standard default values) when starting from a protein sequence. The BLAST results may optionally be filtered. The full-length sequences of either the filtered results or non-filtered results are then BLASTed back (second BLAST) against sequences from the organism from which the query sequence is derived (where the query sequence is SEQ ID NO: 246 or SEQ ID NO: 248, the second BLAST would therefore be against Arabidopsis thaliana sequences). The results of the first and second BLASTs are then compared. A paralogue is identified if a high-ranking hit from the first blast is from the same species as from which the query sequence is derived, a BLAST back then ideally results in the query sequence amongst the highest hits; an orthologue is identified if a high-ranking hit in the first BLAST is not from the same species as from which the query sequence is derived, and preferably results upon BLAST back in the query sequence being among the highest hits.

[0212] Concerning 6-PGDH polypeptides, the present invention is illustrated by transforming plants with the nucleic acid sequence represented by SEQ ID NO: 280, encoding the polypeptide sequence of SEQ ID NO: 281. However, performance of the invention is not restricted to these sequences; the methods of the invention may advantageously be performed using any 6-PGDH-encoding nucleic acid or 6-PGDH polypeptide as defined herein, preferably any one of those listed in Table A4.

[0213] Examples of nucleic acids encoding 6-PGDH polypeptides may be found in databases known in the art. Such nucleic acids are useful in performing the methods of the invention.

[0214] Orthologues and paralogues, the terms “orthologues” and “paralogues” being as defined herein, may readily be identified by performing a so-called reciprocal blast search. Typically, this involves a first BLAST involving BLASTing a query sequence (for example using SEQ ID NO: 281) against any sequence database, such as the publicly available NCBI database. BLASTN or TBLASTX (using standard default values) are generally used when starting from a nucleotide sequence, and BLASTP or TBLASTN (using standard default values) when starting from a protein sequence. The BLAST results may optionally be filtered. The full-length sequences of either the filtered results or non-filtered results are then BLASTed back (second BLAST) against sequences from the organism from which the query sequence is derived (where the query sequence is SEQ ID NO: 280 or SEQ ID NO: 281, the second BLAST would therefore be against Oryza sativa sequences). The results of the first and second BLASTs are then compared. A paralogue is identified if a high-ranking hit from the first blast is from the same species as from which the query sequence is derived, a BLAST back then ideally results in the query sequence amongst the highest hits; an orthologue is identified if a high-ranking hit in the first BLAST is not from the same species as from which the query sequence is derived, and preferably results upon BLAST back in the query sequence being among the highest hits.

[0215] High-ranking hits are those having a low E-value. The lower the E-value, the more significant the score (or in other words the lower the chance that the hit was found by chance). Computation of the E-value is well known in the art. In addition to E-values, comparisons are also scored by percentage identity. Percentage identity refers to the number of identical nucleotides (or amino acids) between the two compared nucleic acid (or polypeptide) sequences over a particular length. In the case of large families, ClustalW may be used, followed by a neighbour joining tree, to help visualize clustering of related genes and to identify orthologues and paralogues.

[0216] Nucleic acid variants may also be useful in practising the methods of the invention. Examples of such variants include nucleic acids encoding homologues and derivatives of any one of the amino acid sequences given in Table A1 to A4 of The Examples section, the terms “homologue” and “derivative” being as defined herein. Also useful in the methods of the invention are nucleic acids encoding homologues and derivatives of orthologues or paralogues of any one of the amino acid sequences given in Table A1 to A4 of The Examples section. Homologues and derivatives useful in the methods of the present invention have substantially the same biological and functional activity as the unmodified protein from which they are derived.

[0217] Further nucleic acid variants useful in practising the methods of the invention include portions of nucleic acids encoding MSR polypeptides, or enolase polypeptides, or ZAT-like zinc transporter polypeptides, or 6-PGDH polypeptides, or nucleic acids hybridising to nucleic acids encoding MSR polypeptides, or enolase polypeptides, or ZAT-like zinc transporter polypeptides, or 6-PGDH polypeptides, splice variants of nucleic acids encoding MSR polypeptides, or enolase polypeptides, or ZAT-like zinc transporter polypeptides, or 6-PGDH polypeptides, allelic variants of nucleic acids encoding MSR polypeptides and variants of nucleic acids encoding MSR polypeptides, or enolase polypeptides, or ZAT-like zinc transporter polypeptides, or 6-PGDH polypeptides, obtained by gene shuffling. The terms hybridising sequence, splice variant, allelic variant and gene shuffling are as described herein.

[0218] Concerning MSR polypeptides, for example SEQ ID NO: 1 represents a variant of SEQ ID NO: 57 having a truncation at the 5′ end. Therefore SEQ ID NO: 1 encodes a derivative of the polypeptide represented by SEQ ID NO: 57, having a truncation a the N-terminus and represented by SEQ ID NO: 2. Similarly SEQ ID NO: 101 encode a variant of SEQ ID NO: 133 having a truncation at the 5′ end. Therefore SEQ ID NO: 101 encodes SEQ ID NO: 102 which is a derivative of the polypeptide represented by SEQ ID NO: 134.

[0219] Nucleic acids encoding MSR polypeptides, or enolase polypeptides, or ZAT-like zinc transporter polypeptides, or 6-PGDH polypeptides, need not be full-length nucleic acids, since performance of the methods of the invention does not rely on the use of full-length nucleic acid sequences. According to the present invention, there is provided a method for enhancing yield-related traits in plants, comprising introducing and expressing in a plant a portion of any one of the nucleic acid sequences given in Table A1 to A4 of The Examples section, or a portion of a nucleic acid encoding an orthologue, paralogue or homologue of any of the amino acid sequences given in Table A1 to A4 of The Examples section.

[0220] A portion of a nucleic acid may be prepared, for example, by making one or more deletions to the nucleic acid. The portions may be used in isolated form or they may be fused to other coding (or non-coding) sequences in order to, for example, produce a protein that combines several activities. When fused to other coding sequences, the resultant polypeptide produced upon translation may be bigger than that predicted for the protein portion.

[0221] Concerning MSR polypeptides, portions useful in the methods of the invention, encode an MSR polypeptide as defined herein, and have substantially the same biological activity as the amino acid sequences given in Table A1 of The Examples section. Preferably, the portion is a portion of any one of the nucleic acids given in Table A1 of The Examples section, or is a portion of a nucleic acid encoding an orthologue or paralogue of any one of the amino acid sequences given in Table A1 of The Examples section. Preferably the portion is at least 300, 400, 500, 550, 600, 650, 700, 750, 800, 850, 900, 950, 1000 consecutive nucleotides in length, the consecutive nucleotides being of any one of the nucleic acid sequences given in Table A1 of The Examples section, or of a nucleic acid encoding an orthologue or paralogue of any one of the amino acid sequences given in Table A1 of The Examples section. Most preferably the portion is a portion of the nucleic acid of SEQ ID NO: 1. Preferably, the portion encodes a fragment of an amino acid sequence having in increasing order of preference at least 25%, 26%, 27%, 28%, 29%, 30%, 31%, 32%, 33%, 34%, 35%, 36%, 37%, 38%, 39%, 40%, 41%, 42%, 43%, 44%, 45%, 46%, 47%, 48%, 49%, 50%, 51%, 52%, 53%, 54%, 55%, 56%, 57%, 58%, 59%, 60%, 61%, 62%, 63%, 64%, 65%, 66%, 67%, 68%, 69%, 70%, 71%, 72%, 73%, 74%, 75%, 76%, 77%, 78%, 79%, 80%, 81%, 82%, 83%, 84%, 85%, 86%, 87%, 88%, 89%, 90%, 91%, 92%, 93%, 94%, 95%, 96%, 97%, 98%, 99% or more amino acid sequence identity to any of the polypeptide sequences given in Table A1 herein provided that the portion comprises one or more of provided conserved motifs as outlined above.

[0222] Concerning enolase polypeptides, portions useful in the methods of the invention, encode an Enolase polypeptide as defined herein, and have substantially the same biological activity as the amino acid sequences given in Table A2 of The Examples section. Preferably, the portion is a portion of any one of the nucleic acids given in Table A2 of The Examples section, or is a portion of a nucleic acid encoding an orthologue or paralogue of any one of the amino acid sequences given in Table A2 of The Examples section. Preferably the portion is at least 100, 200, 300, 400, 500, 550, 600, 650, 700, 750, 800, 850, 900, 950, 1000 consecutive nucleotides in length, the consecutive nucleotides being of any one of the nucleic acid sequences given in Table A2 of The Examples section, or of a nucleic acid encoding an orthologue or paralogue of any one of the amino acid sequences given in Table A2 of The Examples section. Most preferably the portion is a portion of the nucleic acid of SEQ ID NO: 193. Preferably, the portion encodes a fragment of an amino acid sequence which, when used in the construction of a phylogenetic tree, such as the one depicted in FIG. 4, clusters with any of the Enolase polypeptides in the tree rather than falling outside of the clades and therefore constituting an outgroup.

[0223] Concerning ZAT-like zinc transporter polypeptides, portions useful in the methods of the invention, encode a ZAT-like zinc transporter polypeptide as defined herein, and have substantially the same biological activity as the amino acid sequences given in Table A3 of Example 1. Preferably, the portion is a portion of any one of the nucleic acids given in Table A3 of Example 1, or is a portion of a nucleic acid encoding an orthologue or paralogue of any one of the amino acid sequences given in Table A3 of Example 1. Preferably the portion is at least 500, 550, 600, 650, 700, 750, 800, 850, 900, 950, 1000, 1050, 1100, 1150, 1200 or more consecutive nucleotides in length, the consecutive nucleotides being of any one of the nucleic acid sequences given in Table A3 of Example 1, or of a nucleic acid encoding an orthologue or paralogue of any one of the amino acid sequences given in Table A3 of Example 1. Most preferably the portion is a portion of the nucleic acid of SEQ ID NO: 246. Preferably, the portion encodes a fragment of an amino acid sequence which, when used in the construction of a phylogenetic tree, such as the one depicted in FIG. 7, clusters with the group of ZAT-like zinc transporter polypeptides comprising the amino acid sequence represented by SEQ ID NO: 248 rather than with any other group.

[0224] Concerning 6-PGDH polypeptides, portions useful in the methods of the invention, encode a 6-PGDH polypeptide as defined herein, and have substantially the same biological activity as the amino acid sequences given in SEQ ID NO: 281. Preferably, the portion is a portion of any one of the nucleic acids given in SEQ ID NO: 280, or is a portion of a nucleic acid encoding an orthologue or paralogue of any one of the amino acid sequences given in SEQ ID NO: 280. Preferably the portion is at least 100, 200, 300, 400, 500, 550, 600, 650, 700, 750, 800, 850, 900 consecutive nucleotides in length, the consecutive nucleotides being of SEQ ID NO: 280, or of a nucleic acid encoding an orthologue or paralogue of SEQ ID NO: 281. Most preferably the portion is a portion of the nucleic acid of SEQ ID NO: 280.

[0225] Concerning MSR polypeptides, alternatively the portion encodes a fragment of an MSR polypeptide which when used in the construction of a phylogenetic tree, such as the one depicted in FIG. 2 of Rouhier et al. 2006, clusters with the group of AtMSRB1 or OsMSRA4 polypeptides rather than with any other group.

[0226] Another nucleic acid variant useful in the methods of the invention is a nucleic acid capable of hybridising, under reduced stringency conditions, preferably under stringent conditions, with a nucleic acid encoding an MSR polypeptide, or an enolase polypeptide, or a ZAT-like zinc transporter polypeptide, or a 6-PGDH polypeptide, as defined herein, or with a portion as defined herein.

[0227] According to the present invention, there is provided a method for enhancing yield-related traits in plants, comprising introducing and expressing in a plant a nucleic acid capable of hybridizing to any one of the nucleic acids given in Table A1 to A4 of The Examples section, or comprising introducing and expressing in a plant a nucleic acid capable of hybridising to a nucleic acid encoding an orthologue, paralogue or homologue of any of the nucleic acid sequences given in Table A1 to A4 of The Examples section.

[0228] Concerning MSR polypeptides, hybridising sequences useful in the methods of the invention encode an MSR polypeptide as defined herein, having substantially the same biological activity as the amino acid sequences given in Table A1 of The Examples section. Preferably, the hybridising sequence is capable of hybridising to the complement of any one of the nucleic acids given in Table A1 of The Examples section, or to a portion of any of these sequences, a portion being as defined above, or the hybridising sequence is capable of hybridising to the complement of a nucleic acid encoding an orthologue or paralogue of any one of the amino acid sequences given in Table A1 of The Examples section. Most preferably, the hybridising sequence is capable of hybridising to the complement of a nucleic acid as represented by SEQ ID NO: 1 or to a portion thereof.

[0229] Preferably, the hybridising sequence encodes a polypeptide with an amino acid sequence having in increasing order of preference at least 25%, 26%, 27%, 28%, 29%, 30%, 31%, 32%, 33%, 34%, 35%, 36%, 37%, 38%, 39%, 40%, 41%, 42%, 43%, 44%, 45%, 46%, 47%, 48%, 49%, 50%, 51%, 52%, 53%, 54%, 55%, 56%, 57%, 58%, 59%, 60%, 61%, 62%, 63%, 64%, 65%, 66%, 67%, 68%, 69%, 70%, 71%, 72%, 73%, 74%, 75%, 76%, 77%, 78%, 79%, 80%, 81%, 82%, 83%, 84%, 85%, 86%, 87%, 88%, 89%, 90%, 91%, 92%, 93%, 94%, 95%, 96%, 97%, 98%, 99% or more sequence identity to any of the polypeptide sequences given in Table A1 herein provided that the polypeptide comprises one or more of provided conserved motifs as outlined above.

[0230] Alternatively, the hybridising sequence encodes a polypeptide with an amino acid sequence which when used in the construction of a phylogenetic tree, such as the one depicted in FIG. 2 of Rouhier et al. 2006, clusters with the group of AtMSRB1 or OsMSRA4 polypeptides rather than with any other group.

[0231] Concerning enolase polypeptides, hybridising sequences useful in the methods of the invention encode an Enolase polypeptide as defined herein, having substantially the same biological activity as the amino acid sequences given in Table A2 of The Examples section. Preferably, the hybridising sequence is capable of hybridising to the complement of any one of the nucleic acids given in Table A2 of The Examples section, or to a portion of any of these sequences, a portion being as defined above, or the hybridising sequence is capable of hybridising to the complement of a nucleic acid encoding an orthologue or paralogue of any one of the amino acid sequences given in Table A2 of The Examples section. Most preferably, the hybridising sequence is capable of hybridising to the complement of a nucleic acid as represented by SEQ ID NO: 193 or to a portion thereof.

[0232] Preferably, the hybridising sequence encodes a polypeptide with an amino acid sequence which, when full-length and used in the construction of a phylogenetic tree, such as the one depicted in FIG. 4, clusters with any of the Enolase polypeptides in the tree rather than falling outside of the clades and therefore constituting an outgroup.

[0233] Concerning ZAT-like zinc transporter polypeptides, hybridising sequences useful in the methods of the invention encode a ZAT-like zinc transporter polypeptide as defined herein, having substantially the same biological activity as the amino acid sequences given in Table A3 of Example 1. Preferably, the hybridising sequence is capable of hybridising to the complement of any one of the nucleic acids given in Table A3 of Example 1, or to a portion of any of these sequences, a portion being as defined above, or the hybridising sequence is capable of hybridising to the complement of a nucleic acid encoding an orthologue or paralogue of any one of the amino acid sequences given in Table A3 of Example 1. Most preferably, the hybridising sequence is capable of hybridising to the complement of a nucleic acid as represented by SEQ ID NO: 246 or to a portion thereof.

[0234] Preferably, the hybridising sequence encodes a polypeptide with an amino acid sequence which, when full-length and used in the construction of a phylogenetic tree, such as the one depicted in FIG. 7, clusters with the group of ZAT-like zinc transporter polypeptides comprising the amino acid sequence represented by SEQ ID NO: 248 rather than with any other group.

[0235] Concerning 6-PGDH polypeptides, hybridising sequences useful in the methods of the invention encode a 6-PGDH polypeptide as defined herein, having substantially the same biological activity as the amino acid sequences given in SEQ ID NO: 281. Preferably, the hybridising sequence is capable of hybridising to SEQ ID NO: 280, or to a portion of any of these sequences, a portion being as defined above, or the hybridising sequence is capable of hybridising to a nucleic acid encoding an orthologue or paralogue of SEQ ID NO: 281.

[0236] Another nucleic acid variant useful in the methods of the invention is a splice variant encoding an MSR polypeptide, or an enolase polypeptide, or a ZAT-like zinc transporter polypeptide, or a 6-PGDH polypeptide, as defined hereinabove, a splice variant being as defined herein.

[0237] According to the present invention, there is provided a method for enhancing yield-related traits in plants, comprising introducing and expressing in a plant a splice variant of any one of the nucleic acid sequences given in Table A1 to A4 of The Examples section, or a splice variant of a nucleic acid encoding an orthologue, paralogue or homologue of any of the amino acid sequences given in Table A1 to A4 of The Examples section.

[0238] Concerning MSR polypeptides, preferred spliced variants are splice variants of a nucleic acid represented by SEQ ID NO: 1 or SEQ ID NO: 101, or a splice variant of a nucleic acid encoding an orthologue or paralogue of SEQ ID NO: 2 or SEQ ID NO: 102 respectively. Preferably, the amino acid sequence encoded by the splice variant has in increasing order of preference at least 25%, 26%, 27%, 28%, 29%, 30%, 31%, 32%, 33%, 34%, 35%, 36%, 37%, 38%, 39%, 40%, 41%, 42%, 43%, 44%, 45%, 46%, 47%, 48%, 49%, 50%, 51%, 52%, 53%, 54%, 55%, 56%, 57%, 58%, 59%, 60%, 61%, 62%, 63%, 64%, 65%, 66%, 67%, 68%, 69%, 70%, 71%, 72%, 73%, 74%, 75%, 76%, 77%, 78%, 79%, 80%, 81%, 82%, 83%, 84%, 85%, 86%, 87%, 88%, 89%, 90%, 91%, 92%, 93%, 94%, 95%, 96%, 97%, 98%, 99% or more amino acid sequence identity to any of the polypeptide sequences given in Table A1 herein provided that the encoded orthologue or paralogue comprise one or more of provided conserved motifs as outlined above.

[0239] Alternatively, spliced variants are splice variants of a nucleic acid encoding an amino acid sequence which when used in the construction of a phylogenetic tree, such as the one depicted in FIG. 2 of Rouhier et al. 2006, clusters with the group of AtMSRB1 or OsMSRA4 polypeptides rather than with any other group.

[0240] Concerning enolase polypeptides, preferred splice variants are splice variants of a nucleic acid represented by SEQ ID NO: 193, or a splice variant of a nucleic acid encoding an orthologue or paralogue of SEQ ID NO: 194. Preferably, the amino acid sequence encoded by the splice variant, when used in the construction of a phylogenetic tree, such as the one depicted in FIG. 4, clusters with any of the Enolase polypeptides in the tree rather than falling outside of the clades and therefore constituting an outgroup.

[0241] Concerning ZAT-like zinc transporter polypeptides, preferred splice variants are splice variants of a nucleic acid represented by SEQ ID NO: 246, or a splice variant of a nucleic acid encoding an orthologue or paralogue of SEQ ID NO: 248. Preferably, the amino acid sequence encoded by the splice variant, when used in the construction of a phylogenetic tree, such as the one depicted in FIG. 7, clusters with the group of ZAT-like zinc transporter polypeptides comprising the amino acid sequence represented by SEQ ID NO: 248 rather than with any other group.

[0242] Another nucleic acid variant useful in performing the methods of the invention is an allelic variant of a nucleic acid encoding an MSR polypeptide, or an enolase polypeptide, or a ZAT-like zinc transporter polypeptide, or a 6-PGDH polypeptide, as defined hereinabove, an allelic variant being as defined herein.

[0243] Concerning MSR polypeptides, the allelic variant preferably is a nucleic acid encoding an amino acid sequence which when used in the construction of a phylogenetic tree, such as the one depicted in FIG. 2 of Rouhier et al. 2006, clusters with the group of AtMSRB1 or OsMSRA4 polypeptides rather than with any other group.

[0244] According to the present invention, there is provided a method for enhancing yield-related traits in plants, comprising introducing and expressing in a plant an allelic variant of any one of the nucleic acids given in Table A1 to A4 of The Examples section, or comprising introducing and expressing in a plant an allelic variant of a nucleic acid encoding an orthologue, paralogue or homologue of any of the amino acid sequences given in Table A1 to A4 of The Examples section.

[0245] Concerning MSR polypeptides, the polypeptides encoded by allelic variants useful in the methods of the present invention have substantially the same biological activity as the MSR polypeptide of SEQ ID NO: 2 or SEQ ID NO: 102 and any of the amino acids depicted in Table A1 of The Examples section. Allelic variants exist in nature, and encompassed within the methods of the present invention is the use of these natural alleles. Preferably, the allelic variant is an allelic variant of SEQ ID NO: 1 or SEQ ID NO: 101 or an allelic variant of a nucleic acid encoding an orthologue or paralogue of SEQ ID NO: 2 or SEQ ID NO: 102. Preferably, the amino acid sequence encoded by the allelic variant having in increasing order of preference at least 25%, 26%, 27%, 28%, 29%, 30%, 31%, 32%, 33%, 34%, 35%, 36%, 37%, 38%, 39%, 40%, 41%, 42%, 43%, 44%, 45%, 46%, 47%, 48%, 49%, 50%, 51%, 52%, 53%, 54%, 55%, 56%, 57%, 58%, 59%, 60%, 61%, 62%, 63%, 64%, 65%, 66%, 67%, 68%, 69%, 70%, 71%, 72%, 73%, 74%, 75%, 76%, 77%, 78%, 79%, 80%, 81%, 82%, 83%, 84%, 85%, 86%, 87%, 88%, 89%, 90%, 91%, 92%, 93%, 94%, 95%, 96%, 97%, 98%, 99% or more amino acid sequence identity to any of the polypeptide sequences given in Table A1 herein provided that the encoded orthologue or paralogue comprise one or more of provided conserved motifs as outlined above.

[0246] Concerning enolase polypeptides, the polypeptides encoded by allelic variants useful in the methods of the present invention have substantially the same biological activity as the ENOLASE polypeptide of SEQ ID NO: 194 and any of the amino acids depicted in Table A2 of The Examples section. Allelic variants exist in nature, and encompassed within the methods of the present invention is the use of these natural alleles. Preferably, the allelic variant is an allelic variant of SEQ ID NO: 193 or an allelic variant of a nucleic acid encoding an orthologue or paralogue of SEQ ID NO: 194. Preferably, the amino acid sequence encoded by the allelic variant, when used in the construction of a phylogenetic tree, such as the one depicted in FIG. 4, clusters with any of the Enolase polypeptides in the tree rather than falling outside of the clades and therefore constituting an outgroup.

[0247] Concerning ZAT-like zinc transporter polypeptides, the polypeptides encoded by allelic variants useful in the methods of the present invention have substantially the same biological activity as the ZAT-like zinc transporter polypeptide of SEQ ID NO: 248 and any of the amino acids depicted in Table A3 of Example 1. Allelic variants exist in nature, and encompassed within the methods of the present invention is the use of these natural alleles. Preferably, the allelic variant is an allelic variant of SEQ ID NO: 246 or an allelic variant of a nucleic acid encoding an orthologue or paralogue of SEQ ID NO: 248. Preferably, the amino acid sequence encoded by the allelic variant, when used in the construction of a phylogenetic tree, such as the one depicted in FIG. 7, clusters with the ZAT-like zinc transporter polypeptides comprising the amino acid sequence represented by SEQ ID NO: 248 rather than with any other group.

[0248] Concerning 6-PGDH polypeptides, the allelic variants useful in the methods of the present invention have substantially the same biological activity as the 6-PGDH polypeptide of SEQ ID NO: 281. Allelic variants exist in nature, and encompassed within the methods of the present invention is the use of these natural alleles.

[0249] Gene shuffling or directed evolution may also be used to generate variants of nucleic acids encoding MSR polypeptides, or enolase polypeptides, or ZAT-like zinc transporter polypeptides, or 6-PGDH polypeptides, as defined above; the term “gene shuffling” being as defined herein.

[0250] According to the present invention, there is provided a method for enhancing yield-related traits in plants, comprising introducing and expressing in a plant a variant of any one of the nucleic acid sequences given in Table A1 to A4 of The Examples section, or comprising introducing and expressing in a plant a variant of a nucleic acid encoding an orthologue, paralogue or homologue of any of the amino acid sequences given in Table A1 to A4 of The Examples section, which variant nucleic acid is obtained by gene shuffling.

[0251] Concerning MSR polypeptides, preferably, the amino acid sequence encoded by the variant nucleic acid obtained by gene shuffling, has in increasing order of preference at least 25%, 26%, 27%, 28%, 29%, 30%, 31%, 32%, 33%, 34%, 35%, 36%, 37%, 38%, 39%, 40%, 41%, 42%, 43%, 44%, 45%, 46%, 47%, 48%, 49%, 50%, 51%, 52%, 53%, 54%, 55%, 56%, 57%, 58%, 59%, 60%, 61%, 62%, 63%, 64%, 65%, 66%, 67%, 68%, 69%, 70%, 71%, 72%, 73%, 74%, 75%, 76%, 77%, 78%, 79%, 80%, 81%, 82%, 83%, 84%, 85%, 86%, 87%, 88%, 89%, 90%, 91%, 92%, 93%, 94%, 95%, 96%, 97%, 98%, 99% or more amino acid sequence identity to any of the polypeptide sequences given in Table A1 herein provided that the encoded amino acid comprise one or more of provided conserved motifs as outlined above.

[0252] Concerning enolase polypeptides, preferably, the amino acid sequence encoded by the variant nucleic acid obtained by gene shuffling, when used in the construction of a phylogenetic tree such as the one depicted in FIG. 4, clusters with any of the Enolase polypeptides in the tree rather than falling outside of the clades and therefore constituting an outgroup.

[0253] Concerning ZAT-like zinc transporter polypeptides, preferably, the amino acid sequence encoded by the variant nucleic acid obtained by gene shuffling, when used in the construction of a phylogenetic tree such as the one depicted in FIG. 7, clusters with the group of ZAT-like zinc transporter polypeptides comprising the amino acid sequence represented by SEQ ID NO: 248 rather than with any other group.

[0254] Furthermore, nucleic acid variants may also be obtained by site-directed mutagenesis. Several methods are available to achieve site-directed mutagenesis, the most common being PCR based methods (Current Protocols in Molecular Biology. Wiley Eds.).

[0255] Nucleic acids encoding MSR polypeptides may be derived from any natural or artificial source. The nucleic acid may be modified from its native form in composition and/or genomic environment through deliberate human manipulation. Preferably the MSR polypeptide-encoding nucleic acid is from a plant, further preferably from a monocotyledonous plant, more preferably from the family Poaceae, most preferably the nucleic acid is from Oryza sativa. Alternatively, a preferred MSR polypeptide-encoding nucleic acid is from a dycotiledoneous plants, more preferably from the plant Medicago truncatula.

[0256] Advantageously, the invention also provides hitherto unknown MSR-encoding nucleic acids and MSR polypeptides.

[0257] According to a further embodiment of the present invention, there is therefore provided an isolated nucleic acid molecule selected from:
[0258] (i) a nucleic acid represented by any one of SEQ ID NO: 31, 33, 41, 105, 107, 109, 113, 115, 117, 119, 121, 123, 125, 165, 167, 169 and SEQ ID NO: 171;
[0259] (ii) the complement of a nucleic acid represented by any one of SEQ ID NO: 31, 33, 41, 105, 107, 109, 113, 115, 117, 119, 121, 123, 125, 165, 167, 169, and SEQ ID NO: 171;
[0260] (iii) a nucleic acid encoding the polypeptide as represented by any one of SEQ ID NO: 32, 34, 42, 106, 108, 110, 114, 116, 118, 120, 122, 124, 126, 166, 168, 170, and SEQ ID NO: 172, preferably as a result of the degeneracy of the genetic code, said isolated nucleic acid can be derived from a polypeptide sequence as represented by any one of SEQ ID NO: 32, 34, 42, 106, 108, 110, 114, 116, 118, 120, 122, 124, 126, 166, 168, 170, and SEQ ID NO: 172 and further preferably confers enhanced yield-related traits relative to control plants;

[0261] (iv) a nucleic acid having, in increasing order of preference at least 30%, 31%, 32%, 33%, 34%, 35%, 36%, 37%, 38%, 39%, 40%, 41%, 42%, 43%, 44%, 45%, 46%, 47%, 48%, 49%, 50%, 51%, 52%, 53%, 54%, 55%, 56%, 57%, 58%, 59%, 60%, 61%, 62%, 63%, 64%, 65%, 66%, 67%, 68%, 69%, 70%, 71%, 72%, 73%, 74%, 75%, 76%, 77%, 78%, 79%, 80%, 81%, 82%, 83%, 84%, 85%, 86%, 87%, 88%, 89%, 90%, 91%, 92%, 93%, 94%, 95%, 96%, 97%, 98%, or 99% sequence identity with any of the nucleic acid sequences of Table A1 and further preferably conferring enhanced yield-related traits relative to control plants;
[0262] (v) a nucleic acid molecule which hybridizes with a nucleic acid molecule of (i) to (iv) under stringent hybridization conditions and preferably confers enhanced yield-related traits relative to control plants;
[0263] (vi) a nucleic acid encoding an MSR polypeptide having, in increasing order of preference, at least 50%, 51%, 52%, 53%, 54%, 55%, 56%, 57%, 58%, 59%, 60%, 61%, 62%, 63%, 64%, 65%, 66%, 67%, 68%, 69%, 70%, 71%, 72%, 73%, 74%, 75%, 76%, 77%, 78%, 79%, 80%, 81%, 82%, 83%, 84%, 85%, 86%, 87%, 88%, 89%, 90%, 91%, 92%, 93%, 94%, 95%, 96%, 97%, 98%, or 99% sequence identity to the amino acid sequence represented by any one of SEQ ID NO: 32, 34, 42, 106, 108, 110, 114, 116, 118, 120, 122, 124, 126, 166, 168, 170, and SEQ ID NO: 172, and any of the other amino acid sequences in Table A1 and preferably conferring enhanced yield-related traits relative to control plants.

[0264] According to a further embodiment of the present invention, there is also provided an isolated polypeptide selected from:
[0265] (i) an amino acid sequence represented by any one of SEQ ID NO: 32, 34, 42, 106, 108, 110, 114, 116, 118, 120, 122, 124, 126, 166, 168, 170, and SEQ ID NO: 172;
[0266] (ii) an amino acid sequence having, in increasing order of preference, at least 50%, 51%, 52%, 53%, 54%, 55%, 56%, 57%, 58%, 59%, 60%, 61%, 62%, 63%, 64%, 65%, 66%, 67%, 68%, 69%, 70%, 71%, 72%, 73%, 74%, 75%, 76%, 77%, 78%, 79%, 80%, 81%, 82%, 83%, 84%, 85%, 86%, 87%, 88%, 89%, 90%, 91%, 92%, 93%, 94%, 95%, 96%, 97%, 98%, or 99% sequence identity to the amino acid sequence represented by any one of SEQ ID NO: 32, 34, 42, 106, 108, 110, 114, 116, 118, 120, 122, 124, 126, 166, 168, 170, and SEQ ID NO: 172 or any of the other amino acid sequences in Table A1 and preferably conferring enhanced yield-related traits relative to control plants.
[0267] (iii) derivatives of any of the amino acid sequences given in (i) or (ii) above.

[0268] Nucleic acids encoding ENOLASE polypeptides may be derived from any natural or artificial source. The nucleic acid may be modified from its native form in composition and/or genomic environment through deliberate human manipulation. Preferably the ENOLASE polypeptide-encoding nucleic acid is from a plant, further preferably from a monocotyledonous plant, more preferably from the family Poaceae, most preferably the nucleic acid is from Oryza sativa.

[0269] Nucleic acids encoding ZAT-like zinc transporter polypeptides may be derived from any natural or artificial source. The nucleic acid may be modified from its native form in composition and/or genomic environment through deliberate human manipulation. Preferably the nucleic acid encoding a ZAT-like zinc transporter polypeptide is from a plant, further preferably from a dicotyledonous plant, more preferably from the family Brasicaceae, most preferably the nucleic acid is from Arabidopsis thaliana.

[0270] Nucleic acids encoding 6-PGDH polypeptides may be derived from any natural or artificial source. The nucleic acid may be modified from its native form in composition and/or genomic environment through deliberate human manipulation. Preferably the 6-PGDH polypeptide-encoding nucleic acid is from a plant. In the case of SEQ ID NO: 280, the 6-PGDH polypeptide encoding nucleic acid is preferably from a monocotyledonous plant, more preferably from the family Poaceae, most preferably the nucleic acid is from Oryza sativa.

[0271] Concerning MSR polypeptides, or enolase polypeptides, or ZAT-like zinc transporter polypeptides, performance of the methods of the invention gives plants having enhanced yield-related traits. In particular performance of the methods of the invention gives plants having increased yield, especially increased seed yield relative to control plants. The terms “yield” and “seed yield” are described in more detail in the “definitions” section herein.

[0272] Concerning 6-PGDH polypeptides, performance of the methods of the invention gives plants having enhanced yield-related traits. In particular performance of the methods of the invention gives plants having increased early vigour and increased yield, especially increased biomass and increased seed yield relative to control plants. The terms “yield” and “seed yield” are described in more detail in the “definitions” section herein.

[0273] Concerning MSR polypeptides, or enolase polypeptides, or ZAT-like zinc transporter polypeptides, reference herein to enhanced yield-related traits is taken to mean an increase in biomass (weight) of one or more parts of a plant, which may include aboveground (harvestable) parts and/or (harvestable) parts below ground. In particular, such harvestable parts are seeds, and performance of the methods of the invention results in plants having increased seed yield relative to the seed yield of control plants.

[0274] Concerning 6-PGDH polypeptides, reference herein to enhanced yield-related traits is taken to mean an increase in early vigour and/or in biomass (weight) of one or more parts of a plant, which may include aboveground (harvestable) parts and/or (harvestable) parts below ground. In particular, such harvestable parts are biomass and/or seeds, and performance of the methods of the invention results in plants having increased early vigour, biomass and/or seed yield relative to the early vigour, biomass or seed yield of control plants.

[0275] Taking corn as an example, a yield increase may be manifested as one or more of the following: increase in the number of plants established per square meter, an increase in the number of ears per plant, an increase in the number of rows, number of kernels per row, kernel weight, thousand kernel weight, ear length/diameter, increase in the seed filling rate (which is the number of filled seeds divided by the total number of seeds and multiplied by 100), among others. Taking rice as an example, a yield increase may manifest itself as an increase in one or more of the following: number of plants per square meter, number of panicles per plant, number of spikelets per panicle, number of flowers (florets) per panicle (which is expressed as a ratio of the number of filled seeds over the number of primary panicles), increase in the seed filling rate (which is the number of filled seeds divided by the total number of seeds and multiplied by 100), increase in thousand kernel weight, among others.

[0276] The present invention provides a method for increasing yield, especially seed yield of plants, relative to control plants, which method comprises modulating expression in a plant of a nucleic acid encoding an MSR polypeptide, or an enolase polypeptide, or a ZAT-like zinc transporter polypeptide, as defined herein.

[0277] The present invention also provides a method for increasing yield, especially biomass and/or seed yield of plants, relative to control plants, which method comprises modulating expression, preferably increasing expression, in a plant of a nucleic acid encoding a 6-PGDH polypeptide as defined herein.

[0278] Since the transgenic plants according to the present invention have increased yield, it is likely that these plants exhibit an increased growth rate (during at least part of their life cycle), relative to the growth rate of control plants at a corresponding stage in their life cycle.

[0279] The increased growth rate may be specific to one or more parts of a plant (including seeds), or may be throughout substantially the whole plant. Plants having an increased growth rate may have a shorter life cycle. The life cycle of a plant may be taken to mean the time needed to grow from a dry mature seed up to the stage where the plant has produced dry mature seeds, similar to the starting material. This life cycle may be influenced by factors such as speed of germination, early vigour, growth rate, greenness index, flowering time and speed of seed maturation. The increase in growth rate may take place at one or more stages in the life cycle of a plant or during substantially the whole plant life cycle. Increased growth rate during the early stages in the life cycle of a plant may reflect enhanced vigour. The increase in growth rate may alter the harvest cycle of a plant allowing plants to be sown later and/or harvested sooner than would otherwise be possible (a similar effect may be obtained with earlier flowering time). If the growth rate is sufficiently increased, it may allow for the further sowing of seeds of the same plant species (for example sowing and harvesting of rice plants followed by sowing and harvesting of further rice plants all within one conventional growing period). Similarly, if the growth rate is sufficiently increased, it may allow for the further sowing of seeds of different plants species (for example the sowing and harvesting of corn plants followed by, for example, the sowing and optional harvesting of soybean, potato or any other suitable plant). Harvesting additional times from the same rootstock in the case of some crop plants may also be possible. Altering the harvest cycle of a plant may lead to an increase in annual biomass production per square meter (due to an increase in the number of times (say in a year) that any particular plant may be grown and harvested). An increase in growth rate may also allow for the cultivation of transgenic plants in a wider geographical area than their wild-type counterparts, since the territorial limitations for growing a crop are often determined by adverse environmental conditions either at the time of planting (early season) or at the time of harvesting (late season). Such adverse conditions may be avoided if the harvest cycle is shortened. The growth rate may be determined by deriving various parameters from growth curves, such parameters may be: T-Mid (the time taken for plants to reach 50% of their maximal size) and T-90 (time taken for plants to reach 90% of their maximal size), amongst others.

[0280] According to a preferred feature of the present invention, performance of the methods of the invention gives plants having an increased growth rate relative to control plants. Therefore, according to the present invention, there is provided a method for increasing the growth rate of plants, which method comprises modulating expression in a plant of a nucleic acid encoding an MSR polypeptide, or an enolase polypeptide, or a ZAT-like zinc transporter polypeptide, or a 6-PGDH polypeptide, as defined herein. Concerning 6-PGDH polypeptides, in a particular embodiment, performance of the methods of the present invention gives plants with increased early vigour.

[0281] An increase in yield and/or growth rate occurs whether the plant is under non-stress conditions or whether the plant is exposed to various stresses compared to control plants. Plants typically respond to exposure to stress by growing more slowly. In conditions of severe stress, the plant may even stop growing altogether. Mild stress on the other hand is defined herein as being any stress to which a plant is exposed which does not result in the plant ceasing to grow altogether without the capacity to resume growth. Mild stress in the sense of the invention leads to a reduction in the growth of the stressed plants of less than 40%, 35% or 30%, preferably less than 25%, 20% or 15%, more preferably less than 14%, 13%, 12%, 11% or 10% or less in comparison to the control plant under non-stress conditions. Due to advances in agricultural practices (irrigation, fertilization, pesticide treatments) severe stresses are not often encountered in cultivated crop plants. As a consequence, the compromised growth induced by mild stress is often an undesirable feature for agriculture. Mild stresses are the everyday biotic and/or abiotic (environmental) stresses to which a plant is exposed. Abiotic stresses may be due to drought or excess water, anaerobic stress, salt stress, chemical toxicity, oxidative stress and hot, cold or freezing temperatures. The abiotic stress may be an osmotic stress caused by a water stress (particularly due to drought), salt stress, oxidative stress or an ionic stress. Biotic stresses are typically those stresses caused by pathogens, such as bacteria, viruses, fungi, nematodes and insects.

[0282] In particular, the methods of the present invention may be performed under non-stress conditions or under conditions of mild drought to give plants having increased yield relative to control plants. As reported in Wang et al. (Planta (2003) 218: 1-14), abiotic stress leads to a series of morphological, physiological, biochemical and molecular changes that adversely affect plant growth and productivity. Drought, salinity, extreme temperatures and oxidative stress are known to be interconnected and may induce growth and cellular damage through similar mechanisms. Rabbani et al. (Plant Physiol (2003) 133: 1755-1767) describes a particularly high degree of “cross talk” between drought stress and high-salinity stress. For example, drought and/or salinisation are manifested primarily as osmotic stress, resulting in the disruption of homeostasis and ion distribution in the cell. Oxidative stress, which frequently accompanies high or low temperature, salinity or drought stress, may cause denaturing of functional and structural proteins. As a consequence, these diverse environmental stresses often activate similar cell signalling pathways and cellular responses, such as the production of stress proteins, up-regulation of anti-oxidants, accumulation of compatible solutes and growth arrest. The term “non-stress” conditions as used herein are those environmental conditions that allow optimal growth of plants. Persons skilled in the art are aware of normal soil conditions and climatic conditions for a given location. Plants with optimal growth conditions, (grown under non-stress conditions) typically yield in increasing order of preference at least 97%, 95%, 92%, 90%, 87%, 85%, 83%, 80%, 77% or 75% A of the average production of such plant in a given environment. Average production may be calculated on harvest and/or season basis. Persons skilled in the art are aware of average yield productions of a crop.

[0283] Performance of the methods of the invention gives plants grown under non-stress conditions or under mild drought conditions increased yield and/or increased early vigour relative to control plants grown under comparable conditions. Therefore, according to the present invention, there is provided a method for increasing yield and/or early vigour in plants grown under non-stress conditions or under mild drought conditions, which method comprises modulating expression in a plant of a nucleic acid encoding an MSR polypeptide, or an enolase polypeptide, or a ZAT-like zinc transporter polypeptide, or a 6-PGDH polypeptide.

[0284] Performance of the methods of the invention gives plants grown under conditions of nutrient deficiency, particularly under conditions of nitrogen deficiency, increased yield relative to control plants grown under comparable conditions. Therefore, according to the present invention, there is provided a method for increasing yield in plants grown under conditions of nutrient deficiency, which method comprises modulating expression in a plant of a nucleic acid encoding an MSR polypeptide, or an enolase polypeptide, or a ZAT-like zinc transporter polypeptide, or a 6-PGDH polypeptide. Nutrient deficiency may result from a lack of nutrients such as nitrogen, phosphates and other phosphorous-containing compounds, potassium, calcium, cadmium, magnesium, manganese, iron and boron, amongst others.

[0285] Performance of the methods of the invention gives plants grown under conditions of salt stress, increased yield relative to control plants grown under comparable conditions. Therefore, according to the present invention, there is provided a method for increasing yield in plants grown under conditions of salt stress, which method comprises modulating expression in a plant of a nucleic acid encoding an MSR polypeptide. The term salt stress is not restricted to common salt (NaCl), but may be any one or more of: NaCl, KCl, LiCl, MgCl₂, CaCl₂, amongst others.

[0286] The present invention encompasses plants or parts thereof (including seeds) obtainable by the methods according to the present invention. The plants or parts thereof comprise a nucleic acid transgene encoding an MSR polypeptide, or an enolase polypeptide, or a ZAT-like zinc transporter polypeptide, or a 6-PGDH polypeptide, as defined above.

[0287] The invention also provides genetic constructs and vectors to facilitate introduction and/or expression in plants of nucleic acids encoding MSR polypeptides, or an enolase polypeptide, or ZAT-like zinc transporter polypeptides, or 6-PGDH polypeptides. The gene constructs may be inserted into vectors, which may be commercially available, suitable for transforming into plants and suitable for expression of the gene of interest in the transformed cells. The invention also provides use of a gene construct as defined herein in the methods of the invention.

[0288] More specifically, the present invention provides a construct comprising:
[0289] (a) a nucleic acid encoding an MSR polypeptide, or an enolase polypeptide, or a ZAT-like zinc transporter polypeptide, or a 6-PGDH polypeptide, as defined above;
[0290] (b) one or more control sequences capable of driving expression of the nucleic acid sequence of (a); and optionally
[0291] (c) a transcription termination sequence.

[0292] Preferably, the nucleic acid encoding an MSR polypeptide, or an enolase polypeptide, or a ZAT-like zinc transporter polypeptide, or a 6-PGDH polypeptide, is as defined above. The term “control sequence” and “termination sequence” are as defined herein.

[0293] Plants are transformed with a vector comprising any of the nucleic acids described above. The skilled artisan is well aware of the genetic elements that must be present on the vector in order to successfully transform, select and propagate host cells containing the sequence of interest. The sequence of interest is operably linked to one or more control sequences (at least to a promoter).

[0294] Advantageously, any type of promoter, whether natural or synthetic, may be used to drive expression of the nucleic acid sequence, but preferably the promoter is of plant origin. A constitutive promoter is particularly useful in the methods. Preferably the constitutive promoter is also a ubiquitous promoter of medium strength. See the “Definitions” section herein for definitions of the various promoter types. Concerning enolase polypeptides, also useful in the methods of the invention is a seed-specific promoter, preferably an ABA (abcisic acid) induced promoter.

[0295] Concerning MSR polypeptides, it should be clear that the applicability of the present invention is not restricted to the MSR polypeptide-encoding nucleic acid represented by SEQ ID NO: 1, nor is the applicability of the invention restricted to expression of an MSR polypeptide-encoding nucleic acid when driven by a constitutive promoter.

[0296] The constitutive promoter is preferably a medium strength promoter, more preferably selected from a plant derived promoter, such as a GOS2 promoter, more preferably is the promoter GOS2 promoter from rice. Further preferably the constitutive promoter is represented by a nucleic acid sequence substantially similar to SEQ ID NO: 188, most preferably the constitutive promoter is as represented by SEQ ID NO: 188. See the “Definitions” section herein for further examples of constitutive promoters.

[0297] Concerning enolase polypeptides, it should be clear that the applicability of the present invention is not restricted to the ENOLASE polypeptide-encoding nucleic acid represented by SEQ ID NO: 193, nor is the applicability of the invention restricted to expression of an Enolase polypeptide-encoding nucleic acid when driven by a constitutive promoter, or when driven by a seed-specific promoter.

[0298] The constitutive promoter is preferably a medium strength promoter, more preferably selected from a plant derived promoter, such as a GOS2 promoter, more preferably is the promoter GOS2 promoter from rice. Further preferably the constitutive promoter is represented by a nucleic acid sequence substantially similar to SEQ ID NO: 241, most preferably the constitutive promoter is as represented by SEQ ID NO: 241. Alternatively, the seed-specific promoter, preferably an ABA (abcisic acid) induced promoter is represented by a nucleic acid sequence substantially similar to SEQ ID NO: 242, most preferably the constitutive promoter is as represented by SEQ ID NO: 242.

[0299] See the “Definitions” section herein for further examples of constitutive and/or seed specific promoters.

[0300] Concerning ZAT-like zinc transporter polypeptides, it should be clear that the applicability of the present invention is not restricted to the ZAT-like zinc transporter encoding nucleic acid represented by SEQ ID NO: 246, nor is the applicability of the invention restricted to expression of a ZAT-like zinc transporter encoding nucleic acid when driven by a constitutive promoter.

[0301] The constitutive promoter is preferably a medium strength promoter, such as a GOS2 promoter, preferably the promoter is a GOS2 promoter from rice. Further preferably the constitutive promoter is represented by a nucleic acid sequence substantially similar to SEQ ID NO: 277, most preferably the constitutive promoter is as represented by SEQ ID NO: 277. See Table 2a in the “Definitions” section herein for further examples of constitutive promoters.

[0302] Optionally, one or more terminator sequences may be used in the construct introduced into a plant. Preferably, the construct comprises an expression cassette comprising a (GOS2) promoter, substantially similar to SEQ ID NO: 32, and the nucleic acid encoding the ZAT-like zinc transporter polypeptide.

[0303] Concerning 6-PGDH polypeptides, it should be clear that the applicability of the present invention is not restricted to the 6-PGDH polypeptide-encoding nucleic acid represented by SEQ ID NO: 280, nor is the applicability of the invention restricted to expression of a 6-PGDH polypeptide-encoding nucleic acid when driven by a constitutive specific promoter.

[0304] The constitutive promoter is preferably a medium strength promoter, such as a GOS2 promoter, preferably the promoter is a GOS2 promoter from rice. Further preferably the constitutive promoter is represented by a nucleic acid sequence substantially similar to SEQ ID NO: 285, most preferably the constitutive promoter is as represented by SEQ ID NO: 6. See Table 2 in the “Definitions” section herein for further examples of constitutive promoters.

[0305] Additional regulatory elements may include transcriptional as well as translational enhancers. Those skilled in the art will be aware of terminator and enhancer sequences that may be suitable for use in performing the invention. An intron sequence may also be added to the 5′ untranslated region (UTR) or in the coding sequence to increase the amount of the mature message that accumulates in the cytosol, as described in the definitions section. Other control sequences (besides promoter, enhancer, silencer, intron sequences, 3′UTR and/or 5′UTR regions) may be protein and/or RNA stabilizing elements. Such sequences would be known or may readily be obtained by a person skilled in the art.

[0306] The genetic constructs of the invention may further include an origin of replication sequence that is required for maintenance and/or replication in a specific cell type. One example is when a genetic construct is required to be maintained in a bacterial cell as an episomal genetic element (e.g. plasmid or cosmid molecule). Preferred origins of replication include, but are not limited to, the f1-ori and colE1.

[0307] For the detection of the successful transfer of the nucleic acid sequences as used in the methods of the invention and/or selection of transgenic plants comprising these nucleic acids, it is advantageous to use marker genes (or reporter genes). Therefore, the genetic construct may optionally comprise a selectable marker gene. Selectable markers are described in more detail in the “definitions” section herein. The marker genes may be removed or excised from the transgenic cell once they are no longer needed. Techniques for marker removal are known in the art, useful techniques are described above in the definitions section.

[0308] The invention also provides a method for the production of transgenic plants having enhanced yield-related traits relative to control plants, comprising introduction and expression in a plant of any nucleic acid encoding an MSR polypeptide, or an enolase polypeptide, or a ZAT-like zinc transporter polypeptide, or a 6-PGDH polypeptide, as defined hereinabove.

[0309] More specifically, the present invention provides a method for the production of transgenic plants having enhanced yield-related traits, particularly increased (seed) yield, which method comprises:
[0310] (i) introducing and expressing in a plant or plant cell a nucleic acid encoding an MSR polypeptide, or an enolase polypeptide, or a ZAT-like zinc transporter polypeptide; and
[0311] (ii) cultivating the plant cell under conditions promoting plant growth and development.

[0312] The nucleic acid of (i) may be any of the nucleic acids capable of encoding an MSR polypeptide, or an enolase polypeptide, or a ZAT-like zinc transporter polypeptide, as defined herein.

[0313] Even more specifically, the present invention provides a method for the production of transgenic plants having increased enhanced yield-related traits, particularly increased early vigour and/or increased yield, which method comprises:
[0314] (i) introducing and expressing in a plant or plant cell a 6-PGDH polypeptide-encoding nucleic acid; and
[0315] (ii) cultivating the plant cell under conditions promoting plant growth and development.

[0316] The nucleic acid of (i) may be any of the nucleic acids capable of encoding a 6-PGDH polypeptide as defined herein.

[0317] The nucleic acid may be introduced directly into a plant cell or into the plant itself (including introduction into a tissue, organ or any other part of a plant). According to a preferred feature of the present invention, the nucleic acid is preferably introduced into a plant by transformation. The term “transformation” is described in more detail in the “definitions” section herein.

[0318] The genetically modified plant cells can be regenerated via all methods with which the skilled worker is familiar. Suitable methods can be found in the abovementioned publications by S. D. Kung and R. Wu, Potrykus or Höfgen and Willmitzer.

[0319] Generally after transformation, plant cells or cell groupings are selected for the presence of one or more markers which are encoded by plant-expressible genes co-transferred with the gene of interest, following which the transformed material is regenerated into a whole plant. To select transformed plants, the plant material obtained in the transformation is, as a rule, subjected to selective conditions so that transformed plants can be distinguished from untransformed plants. For example, the seeds obtained in the above-described manner can be planted and, after an initial growing period, subjected to a suitable selection by spraying. A further possibility consists in growing the seeds, if appropriate after sterilization, on agar plates using a suitable selection agent so that only the transformed seeds can grow into plants. Alternatively, the transformed plants are screened for the presence of a selectable marker such as the ones described above.

[0320] Following DNA transfer and regeneration, putatively transformed plants may also be evaluated, for instance using Southern analysis, for the presence of the gene of interest, copy number and/or genomic organisation. Alternatively or additionally, expression levels of the newly introduced DNA may be monitored using Northern and/or Western analysis, both techniques being well known to persons having ordinary skill in the art.

[0321] The generated transformed plants may be propagated by a variety of means, such as by clonal propagation or classical breeding techniques. For example, a first generation (or T1) transformed plant may be selfed and homozygous second-generation (or T2) transformants selected, and the T2 plants may then further be propagated through classical breeding techniques. The generated transformed organisms may take a variety of forms. For example, they may be chimeras of transformed cells and non-transformed cells; clonal transformants (e.g., all cells transformed to contain the expression cassette); grafts of transformed and untransformed tissues (e.g., in plants, a transformed rootstock grafted to an untransformed scion).

[0322] The present invention clearly extends to any plant cell or plant produced by any of the methods described herein, and to all plant parts and propagules thereof. The present invention extends further to encompass the progeny of a primary transformed or transfected cell, tissue, organ or whole plant that has been produced by any of the aforementioned methods, the only requirement being that progeny exhibit the same genotypic and/or phenotypic characteristic(s) as those produced by the parent in the methods according to the invention.

[0323] The invention also includes host cells containing an isolated nucleic acid encoding an MSR polypeptide, or an enolase polypeptide, or a ZAT-like zinc transporter polypeptide, or a 6-PGDH polypeptide, as defined hereinabove. Preferred host cells according to the invention are plant cells. Host plants for the nucleic acids or the vector used in the method according to the invention, the expression cassette or construct or vector are, in principle, advantageously all plants, which are capable of synthesizing the polypeptides used in the inventive method.

[0324] The methods of the invention are advantageously applicable to any plant. Plants that are particularly useful in the methods of the invention include all plants which belong to the superfamily Viridiplantae, in particular monocotyledonous and dicotyledonous plants including fodder or forage legumes, ornamental plants, food crops, trees or shrubs. According to a preferred embodiment of the present invention, the plant is a crop plant. Examples of crop plants include soybean, sunflower, canola, alfalfa, rapeseed, linseed, cotton, tomato, potato and tobacco. Further preferably, the plant is a monocotyledonous plant. Examples of monocotyledonous plants include sugarcane. More preferably the plant is a cereal. Examples of cereals include rice, maize, wheat, barley, millet, rye, triticale, sorghum, emmer, spelt, secale, einkorn, teff, milo and oats.

[0325] The invention also extends to harvestable parts of a plant such as, but not limited to seeds, leaves, fruits, flowers, stems, roots, rhizomes, tubers and bulbs, which harvestable parts comprise a recombinant nucleic acid encoding an MSR polypeptide, or an enolase polypeptide, or a ZAT-like zinc transporter polypeptide, or a 6-PGDH polypeptide. The invention furthermore relates to products derived, preferably directly derived, from a harvestable part of such a plant, such as dry pellets or powders, oil, fat and fatty acids, starch or proteins.

[0326] According to a preferred feature of the invention, the modulated expression is increased expression. Methods for increasing expression of nucleic acids or genes, or gene products, are well documented in the art and examples are provided in the definitions section.

[0327] As mentioned above, a preferred method for modulating expression of a nucleic acid encoding an MSR polypeptide, or an enolase polypeptide, or a ZAT-like zinc transporter polypeptide, or a 6-PGDH polypeptide, is by introducing and expressing in a plant a nucleic acid encoding an MSR polypeptide, or an enolase polypeptide, or a ZAT-like zinc transporter polypeptide, or a 6-PGDH polypeptide; however the effects of performing the method, i.e. enhancing yield-related traits may also be achieved using other well known techniques, including but not limited to T-DNA activation tagging, TILLING, homologous recombination. A description of these techniques is provided in the definitions section.

[0328] The present invention also encompasses use of nucleic acids encoding MSR polypeptides, or enolase polypeptides, or ZAT-like zinc transporter polypeptides, or 6-PGDH polypeptides, as described herein and use of these MSR polypeptides, or enolase polypeptides, or ZAT-like zinc transporter polypeptides, or 6-PGDH polypeptides, in enhancing any of the aforementioned yield-related traits in plants.

[0329] Nucleic acids encoding MSR polypeptides, or enolase polypeptides, or ZAT-like zinc transporter polypeptides, or 6-PGDH polypeptides, described herein, or the MSR polypeptides themselves, may find use in breeding programmes in which a DNA marker is identified which may be genetically linked to a gene encoding MSR polypeptides, or enolase polypeptides, or ZAT-like zinc transporter polypeptides, or 6-PGDH polypeptides. The nucleic acids/genes, or the MSR polypeptides, or enolase polypeptides, or ZAT-like zinc transporter polypeptides, or 6-PGDH polypeptides, themselves may be used to define a molecular marker. This DNA or protein marker may then be used in breeding programmes to select plants having enhanced yield-related traits as defined hereinabove in the methods of the invention.

[0330] Allelic variants of a nucleic acid/gene encoding MSR polypeptides, or enolase polypeptides, or ZAT-like zinc transporter polypeptides, or 6-PGDH polypeptides, may also find use in marker-assisted breeding programmes. Such breeding programmes sometimes require introduction of allelic variation by mutagenic treatment of the plants, using for example EMS mutagenesis; alternatively, the programme may start with a collection of allelic variants of so called “natural” origin caused unintentionally. Identification of allelic variants then takes place, for example, by PCR. This is followed by a step for selection of superior allelic variants of the sequence in question and which give increased yield. Selection is typically carried out by monitoring growth performance of plants containing different allelic variants of the sequence in question. Growth performance may be monitored in a greenhouse or in the field. Further optional steps include crossing plants in which the superior allelic variant was identified with another plant. This could be used, for example, to make a combination of interesting phenotypic features.

[0331] Nucleic acids encoding MSR polypeptides, or enolase polypeptides, or ZAT-like zinc transporter polypeptides, or 6-PGDH polypeptides, may also be used as probes for genetically and physically mapping the genes that they are a part of, and as markers for traits linked to those genes. Such information may be useful in plant breeding in order to develop lines with desired phenotypes. Such use of nucleic acids encoding MSR polypeptides, or enolase polypeptides, or ZAT-like zinc transporter polypeptides, or 6-PGDH polypeptides, requires only a nucleic acid sequence of at least 15 nucleotides in length. The nucleic acids encoding MSR polypeptides, or enolase polypeptides, or ZAT-like zinc transporter polypeptides, or 6-PGDH polypeptides, may be used as restriction fragment length polymorphism (RFLP) markers. Southern blots (Sambrook J, Fritsch E F and Maniatis T (1989) Molecular Cloning, A Laboratory Manual) of restriction-digested plant genomic DNA may be probed with the nucleic acids encoding MSR polypeptides, or enolase polypeptides, or ZAT-like zinc transporter polypeptides, or 6-PGDH polypeptides. The resulting banding patterns may then be subjected to genetic analyses using computer programs such as MapMaker (Lander et al. (1987) Genomics 1: 174-181) in order to construct a genetic map. In addition, the nucleic acids may be used to probe Southern blots containing restriction endonuclease-treated genomic DNAs of a set of individuals representing parent and progeny of a defined genetic cross. Segregation of the DNA polymorphisms is noted and used to calculate the position of the nucleic acid encoding MSR polypeptides, or enolase polypeptides, or ZAT-like zinc transporter polypeptides, or 6-PGDH polypeptides, in the genetic map previously obtained using this population (Botstein et al. (1980) Am. J. Hum. Genet. 32:314-331).

[0332] The production and use of plant gene-derived probes for use in genetic mapping is described in Bernatzky and Tanksley (1986) Plant Mol. Biol. Reporter 4: 37-41. Numerous publications describe genetic mapping of specific cDNA clones using the methodology outlined above or variations thereof. For example, F2 intercross populations, backcross populations, randomly mated populations, near isogenic lines, and other sets of individuals may be used for mapping. Such methodologies are well known to those skilled in the art.

[0333] The nucleic acid probes may also be used for physical mapping (i.e., placement of sequences on physical maps; see Hoheisel et al. In: Non-mammalian Genomic Analysis: A Practical Guide, Academic press 1996, pp. 319-346, and references cited therein).

[0334] Concerning 6-PGDH polypeptides, as shown in the present invention, modulated expression of a nucleic acid encoding a 6-PGDH protein as defined above, in a specific spatial and temporal expression pattern gives plants having improved yield-related traits. This information can be used in a screen for identifying a compound or a composition of compounds that modulates the activity of a regulatory sequence (for example a promoter), resulting in a desired expression pattern of a 6-PGDH operably linked to that regulatory sequence in methods for improving yield-related traits in a plant. Preferably, the expression pattern is the one that is used in the methods of the present invention. By operably linking a regulatory sequence (such as the native promoter of a 6-PGDH gene) to a reporter gene, chemicals (alone or in combination) are tested for their impact on the expression pattern of the reporter gene. Chemical compounds that induce a desired expression pattern are retained as candidate modulators of 6-PGDH expression in methods for improving yield-related traits. A high throughput screen may be applied for testing large amounts of chemical compounds, since the expression pattern of the reporter gene can be used as an indicator of the yield increase. The invention thus provides use of 6-PGDH encoding nucleic acids and/or of regulatory sequences of 6-PGDH genes in such screens.

[0335] In another embodiment, the nucleic acid probes may be used in direct fluorescence in situ hybridisation (FISH) mapping (Trask (1991) Trends Genet. 7:149-154). Although current methods of FISH mapping favour use of large clones (several kb to several hundred kb; see Laan et al. (1995) Genome Res. 5:13-20), improvements in sensitivity may allow performance of FISH mapping using shorter probes.

[0336] A variety of nucleic acid amplification-based methods for genetic and physical mapping may be carried out using the nucleic acids. Examples include allele-specific amplification (Kazazian (1989) J. Lab. Clin. Med. 11:95-96), polymorphism of PCR-amplified fragments (CAPS; Sheffield et al. (1993) Genomics 16:325-332), allele-specific ligation (Landegren et al. (1988) Science 241:1077-1080), nucleotide extension reactions (Sokolov (1990) Nucleic Acid Res. 18:3671), Radiation Hybrid Mapping (Walter et al. (1997) Nat. Genet. 7:22-28) and Happy Mapping (Dear and Cook (1989) Nucleic Acid Res. 17:6795-6807). For these methods, the sequence of a nucleic acid is used to design and produce primer pairs for use in the amplification reaction or in primer extension reactions. The design of such primers is well known to those skilled in the art. In methods employing PCR-based genetic mapping, it may be necessary to identify DNA sequence differences between the parents of the mapping cross in the region corresponding to the instant nucleic acid sequence. This, however, is generally not necessary for mapping methods.

[0337] The methods according to the present invention result in plants having enhanced yield-related traits, as described hereinbefore. These traits may also be combined with other economically advantageous traits, such as further yield-enhancing traits, tolerance to other abiotic and biotic stresses, traits modifying various architectural features and/or biochemical and/or physiological features.

### Items

[0338] The present invention will now be described in reference to the following items:

### 1. Methionine Sulfoxide Reductase (Msr)

[0339] 1. A method for enhancing yield-related traits in plants relative to control plants, comprising modulating expression in a plant of a nucleic acid encoding an MSR polypeptide, wherein said MSR polypeptide has in increasing order of preference at least 25%, 26%, 27%, 28%, 29%, 30%, 31%, 32%, 33%, 34%, 35%, 36%, 37%, 38%, 39%, 40%, 41%, 42%, 43%, 44%, 45%, 46%, 47%, 48%, 49%, 50%, 51%, 52%, 53%, 54%, 55%, 56%, 57%, 58%, 59%, 60%, 61%, 62%, 63%, 64%, 65%, 66%, 67%, 68%, 69%, 70%, 71%, 72%, 73%, 74%, 75%, 76%, 77%, 78%, 79%, 80%, 81%, 82%, 83%, 84%, 85%, 86%, 87%, 88%, 89%, 90%, 91%, 92%, 93%, 94%, 95%, 96%, 97%, 98%, 99% or more amino acid sequence identity to any of the polypeptide sequences given in Table A1 herein.
[0340] 2. Method according to item 1, wherein said MSR polypeptide comprises at least one conserved protein motif having in increasing order of preference 50%, 51%, 52%, 53%, 54%, 55%, 56%, 57%, 58%, 59%, 60%, 61%, 62%, 63%, 64%, 65%, 66%, 67%, 68%, 69%, 70%, 71%, 72%, 73%, 74%, 75%, 76%, 77%, 78%, 79%, 80%, 81%, 82%, 83%, 84%, 85%, 86%, 87%, 88%, 89%, 90%, 91%, 92%, 93%, 94%, 95%, 96%, 97%, 98%, or 99% sequence identity to any one of:
   [0341] (i) Motif 1 as represented by SEQ ID NO: 173: (Q)(Y)(R)(S)
   [0342] (ii) Motif 2 as represented by SEQ ID NO: 174: (Y/H/E/D/G)(H/S)(Q/R)(Q/K/R) (Y/F)(L/C/E)
   [0343] (iii) Motif 3 as represented by SEQ ID NO: 175: (I/V)(V/M/I/A/R/F/T)(T/V/R)(E/D/T) (I/V/I/Q)(L/K/A/V/I)(P/G/T/K)(A/S/P/T/Q)
   [0344] (iv) Motif 4 as represented by SEQ ID NO: 176: (A/F/T/-)(Q/v/e/s/c/t/-)(F/I/A/-)(G/A/-) (A/L/S/T/-)(G/-)(C/S/-)(F/-)(W/-)(G/R/S/-)(V/S/G/-)(E/-)(L/-)(A/M/G/V/T/-)(F/C/A/Y/-) (Q/W/R/G/-)(R/C/E/-)(V/I/L/S/A/-)(P/H/R/N/S/-)(G/-)(V/L/-)(T/V/I/Y/R/A/-)(K/R/E/S/A/Y/Q/V/-)(T/A/-)(E/S/R/A/-)(V/A/-)(G/-)(Y/-)(T/S/A/V/I/-)(Q/G/A/H/-)(G/-)(N/S/L/H/K/A/D/Q/-)(L/K/S/T/I/V/F/R/M/-)(H/T/A/S/Q/K/E/P/D/-)(N/D/H/R/G/E/M/-)(P/-)(T/S/L/N/D/-)(Y/-)(E/R/K/Y/G/Q/-)(D/A/L/-)(V/E/D/A/I/-)(C/Y/-)(T/S/R/H/G/-)(G/N/S/-)(A/L/V/Q/R/K/T/D/M/-)(T/G/A/-)(Y/D/G/N/S/K/-)(H/-)(S/A/T/V/N/M)(E/Q)(V/S/F/A/G/C)(V/L/D)(R/Q/E/K/Y)(V/I/L/M)(Q/H/E/TN/I)(Y/F)(D/N)(P/V/L)(K/R/S/Q/A/N)(A/V/L/I/M/Q/E/D/N)(C/I/V/G)(K/P/K/T/G/Q/H)(Y/F)(D/R/S/K/T/E/Q)(D/Q/K/N/T/V/S)(L/I)(L/V)(D/E/S/A/K)(V/F/I/L/M/A/T)(F/H/L)(W/Y)(A/S/Q/K/T/D/N)(R/K/S/M/N)(H)(D/N)(P/S)(T/R)(T/Q/E/A)(L/P/V/I/G/K/F)(N/F/H/M/D)(R/G)(Q)(G/V)(N/P/G/A/E)(D/L)(V/Q/R/L/S)(G)(T/N/A/S/P)(Q)(Y)(R)(S)(G/V/A/C/I)(I/V/L)(Y/F)(Y/T/F/C)(Y/N/H/Q/T/S)
   [0345] (v) Motif 5 as represented by SEQ ID NO: 177: (G)(W)(P)
   [0346] (vi) Motif 6 as represented by SEQ ID NO: 178: (L/V)(Y/F/L)(K/D/E/Q/S/R)(S/T/-)(T/S/A/I/L/K/D/-)(T/A/-)(K/-)(F/-)(D/N/-)(S/A/R)(G/P)
   [0347] (vii) Motif 7 as represented by SEQ ID NO: 179: (G/D/E/N/-)(G/A/S/I/-)(H/F/-)(L/F/-)(G/F/C/-)(H/F)(V/I/S)(F/T/H/L/V) (K/D/P/M/L/I/R)
   [0348] (viii) Motif 8 as represented by SEQ ID NO: 180: (K/R/L/T/W/L/F/I/-)(S/T/R/Q/P/K/G/-) (E/D/N/A/T/K/-)(E/A/Q/A/G/R/-)(E/D/R/-)((W/L/Q/-)(R/K/A/V/E/Q/-)(A/V/K/T/Q/R/-) (V/I/Q/R/K/G/-)(L/A/-)(S/T/E/N/-)(P/D/S/Q/A/N/E/K/-)(E/D/Q/A/-)(Q/E/A)(F/Y/R/-)(R/Y/H/K/T/Q/-)(I/V/-)(L/T/A/-)(R/L/-)(Q/K/L/D/R/E/H/-)(K/A/E/H/-)(G/M/S/A)(T/I/S)(E/D/R) (R/A/K/N/Y/T/I/P/F/L)(P/A/K/Q/R/A)(G/F/N)(T/S/K/C)(G/S/E)(E/P/V/R)(Y/F/L)(N/D/W/V/T/L/E)(K/N/Q/D)(F/T/N/V/L/K/E/S)(F/W/Y/K/H/D/S)(T/N/A/G/E/D/K/R)(E/P/A/D/K/Q/V)(G)(I/V/A/T)(Y/F)
   [0349] (ix) Motif 9 as represented by SEQ ID NO: 181: (C)(A/V/I/R)(G/C/L)(C)(G/A/D/N/K/Q/E)(T/S/A/L/N)(P/A/D/K)(L/V)(Y/F/L)(K/E/D/Q/S/R)(S/-)(T/S/K/D/A/I/L)
   [0350] (x) Motif 10 as represented by SEQ ID NO: 182: (A/S)(F/Y)(F/Y/W/D)(E/Q/D/R/A)(G/P/T/A)(I/V/L/F)(G/P/A/D)(G/A/P/N/D/K/E)(A/N/T)(I/V/H)(N/K/T/G/V/I/A)(R/Q/S/E/T)(T/K/H/I/E/A/S/N)(P/L/R/T/A/M/V/I/E)(D/E/R/I/G/N)(P/L/A/D/R/W/M)(D/E/S/T/A/G/-)(G/I/S/F/H/-)(R/I/F/P/G/H/L/K/M/-)(R/F/S/G/M/-)(M/V/Y/I/T/-)(P/R/V/-)(R/-)(Q/T/-)(E/A/-)(I/V/S/T/-)(T/L/I/V/H/N/-)(C/-)
   [0351] (xi) Motif 11 as represented by SEQ ID NO: 183: (G/A/S/I/-)(H/F/-)(L/F/-)(G/F/C/-)(H/F) (V/I /S)(F/T/H/L/V)(K/D/P/M/L/I/R) (G/D/N/T/V)(E/G/R/H)(G/P/N/D/W/S)(F/P/H/Y/I/N/R/S)(S/L/P/A/D/G/K/R-)(T/R/N/V/-)(P/D/A/F/T/-)(T/L/F/S/R)(D/G/L/Y/N)(E/K/A/N/Q/L)(R/K/D/E/A/P)(H/Y/I/L/K/C/F) (C/V/-)(V/L/I/S/M/-)(N/Q/K/L/-)(S/L/Q/R/-)(V/I/A/R/Y/-)
   [0352] Wherein the amino acid at each position is given between brackets and “-” represents a gap, that is, the absence of an amino acid at said position.
[0353] 3. Method according to item 1 or 2, wherein said modulated expression is effected by introducing and expressing in a plant a nucleic acid encoding an MSR polypeptide.
[0354] 4. Method according to any one of items 1 to 3, wherein said nucleic acid encoding an MSR polypeptide encodes any one of the proteins listed in Table A or is a portion of such a nucleic acid, or a nucleic acid capable of hybridising with such a nucleic acid.
[0355] 5. Method according to any one of items 1 to 4, wherein said nucleic acid sequence encodes an orthologue or paralogue of any of the proteins given in Table A.
[0356] 6. Method according to any preceding item, wherein said enhanced yield-related traits comprise increased yield, preferably increased biomass and/or increased seed yield relative to control plants.
[0357] 7. Method according to any one of items 1 to 6, wherein said enhanced yield-related traits are obtained under non-stress conditions.
[0358] 8. Method according to any one of items 1 to 6, wherein said enhanced yield-related traits are obtained under conditions of drought stress, salt stress or nitrogen deficiency.
[0359] 9. Method according to any one of items 3 to 8, wherein said nucleic acid is operably linked to a constitutive promoter, preferably to a GOS2 promoter, most preferably to a GOS2 promoter from rice.
[0360] 10. Method according to any one of items 1 to 9, wherein said nucleic acid encoding an MSR polypeptide is of plant origin, preferably from a monocotyledonous plant, more preferably from the genus Oryza, most preferably from Oryza sativa or from a dycotyledoneous plant, more preferably from the genus Medicago, most preferably from Medicago truncatula.
[0361] 11. Plant or part thereof, including seeds, obtainable by a method according to any one of items 1 to 10, wherein said plant or part thereof comprises a recombinant nucleic acid encoding an MSR polypeptide.
[0362] 12. Construct comprising:
   [0363] (a) nucleic acid encoding an MSR polypeptide as defined in items 1, 2 or 22;
   [0364] (b) one or more control sequences capable of driving expression of the nucleic acid sequence of (a); and optionally
   [0365] (c) a transcription termination sequence.
[0366] 13. Construct according to item 12, wherein one of said control sequences is a constitutive promoter, preferably a GOS2 promoter, most preferably a GOS2 promoter from rice.
[0367] 14. Use of a construct according to item 12 or 13 in a method for making plants having increased yield, particularly increased biomass and/or increased seed yield relative to control plants.
[0368] 15. Plant, plant part or plant cell transformed with a construct according to item 12 or 13.
[0369] 16. Method for the production of a transgenic plant having increased yield, particularly increased biomass and/or increased seed yield relative to control plants, comprising:
   [0370] (i) introducing and expressing in a plant a nucleic acid encoding an MSR polypeptide as defined in item 1 or 2; and
   [0371] (ii) cultivating the plant cell under conditions promoting plant growth and development.
[0372] 17. Transgenic plant having increased yield, particularly increased biomass and/or increased seed yield, relative to control plants, resulting from modulated expression of a nucleic acid encoding an MSR polypeptide as defined in item 1 or 2, or a transgenic plant cell derived from said transgenic plant.
[0373] 18. Transgenic plant according to item 11, 15 or 17, or a transgenic plant cell derived thereof, wherein said plant is a crop plant or a monocot or a cereal, such as rice, maize, wheat, barley, millet, rye, triticale, sorghum emmer, spelt, secale, einkorn, teff, milo and oats.
[0374] 19. Harvestable parts of a plant according to item 18, wherein said harvestable parts are preferably shoot biomass and/or seeds.
[0375] 20. Products derived from a plant according to item 18 and/or from harvestable parts of a plant according to item 19.
[0376] 21. Use of a nucleic acid encoding an MSR polypeptide in increasing yield, particularly in increasing seed yield and/or shoot biomass in plants, relative to control plants.
[0377] 22. An isolated nucleic acid molecule selected from:
   [0378] (i) a nucleic acid represented by any one of SEQ ID NO: 31, 33, 41, 105, 107, 109, 113, 115, 117, 119, 121, 123, 125, 165, 167, 169, and SEQ ID NO: 171;
   [0379] (ii) the complement of a nucleic acid represented by any one of SEQ ID NO: 31, 33, 41, 105, 107, 109, 113, 115, 117, 119, 121, 123, 125, 165, 167, 169, and SEQ ID NO: 171;
   [0380] (iii) a nucleic acid encoding the polypeptide as represented by any one of SEQ ID NO: 32, 34, 42, 106, 108, 110, 114, 116, 118, 120, 122, 124, 126, 166, 168, 170, and SEQ ID NO: 172, preferably as a result of the degeneracy of the genetic code, said isolated nucleic acid can be derived from a polypeptide sequence as represented by any one of SEQ ID NO: 32, 34, 42, 106, 108, 110, 114, 116, 118, 120, 122, 124, 126, 166, 168, 170, and SEQ ID NO: 172, and further preferably confers enhanced yield-related traits relative to control plants;
   [0381] (iv) a nucleic acid having, in increasing order of preference at least 30%, 31%, 32%, 33%, 34%, 35%, 36%, 37%, 38%, 39%, 40%, 41%, 42%, 43%, 44%, 45%, 46%, 47%, 48%, 49%, 50%, 51%, 52%, 53%, 54%, 55%, 56%, 57%, 58%, 59%, 60%, 61%, 62%, 63%, 64%, 65%, 66%, 67%, 68%, 69%, 70%, 71%, 72%, 73%, 74%, 75%, 76%, 77%, 78%, 79%, 80%, 81%, 82%, 83%, 84%, 85%, 86%, 87%, 88%, 89%, 90%, 91%, 92%, 93%, 94%, 95%, 96%, 97%, 98%, or 99% sequence identity with any of the nucleic acid sequences of Table A1 and further preferably conferring enhanced yield-related traits relative to control plants;
   [0382] (v) a nucleic acid molecule which hybridizes with a nucleic acid molecule of (i) to (iv) under stringent hybridization conditions and preferably confers enhanced yield-related traits relative to control plants;
   [0383] (vi) a nucleic acid encoding an MSR polypeptide having, in increasing order of preference, at least 50%, 51%, 52%, 53%, 54%, 55%, 56%, 57%, 58%, 59%, 60%, 61%, 62%, 63%, 64%, 65%, 66%, 67%, 68%, 69%, 70%, 71%, 72%, 73%, 74%, 75%, 76%, 77%, 78%, 79%, 80%, 81%, 82%, 83%, 84%, 85%, 86%, 87%, 88%, 89%, 90%, 91%, 92%, 93%, 94%, 95%, 96%, 97%, 98%, or 99% sequence identity to the amino acid sequence represented by any one of SEQ ID NO: 32, 34, 42, 106, 108, 110, 114, 116, 118, 120, 122, 124, 126, 166, 168, 170, and SEQ ID NO: 172, and any of the other amino acid sequences in Table A1 and preferably conferring enhanced yield-related traits relative to control plants.
[0384] 23. An isolated polypeptide selected from:
   [0385] (i) an amino acid sequence represented by any one of SEQ ID NO: 32, 34, 42, 106, 108, 110, 114, 116, 118, 120, 122, 124, 126, 166, 168, 170, and SEQ ID NO: 172;
   [0386] (ii) an amino acid sequence having, in increasing order of preference, at least 50%, 51%, 52%, 53%, 54%, 55%, 56%, 57%, 58%, 59%, 60%, 61%, 62%, 63%, 64%, 65%, 66%, 67%, 68%, 69%, 70%, 71%, 72%, 73%, 74%, 75%, 76%, 77%, 78%, 79%, 80%, 81%, 82%, 83%, 84%, 85%, 86%, 87%, 88%, 89%, 90%, 91%, 92%, 93%, 94%, 95%, 96%, 97%, 98%, or 99% sequence identity to the amino acid sequence represented by any one of SEQ ID NO: 32, 34, 42, 106, 108, 110, 114, 116, 118, 120, 122, 124, 126, 166, 168, 170, and SEQ ID NO: 172 or any of the other amino acid sequences in Table A and preferably conferring enhanced yield-related traits relative to control plants.
   [0387] (iii) derivatives of any of the amino acid sequences given in (i) or (ii) above.
      2. Enolase (2-phospho-D-glycerate hydrolase)
[0388] 1. A method for enhancing yield-related traits in plants relative to control plants, comprising modulating expression in a plant of a nucleic acid encoding an Enolase polypeptide, wherein said Enolase polypeptide comprises a protein domain having in increasing order of preference at least 50%, 51%, 52%, 53%, 54%, 55%, 56%, 57%, 58%, 59%, 60%, 61%, 62%, 63%, 64%, 65%, 66%, 67%, 68%, 69%, 70%, 71%, 72%, 73%, 74%, 75%, 76%, 77%, 78%, 79%, 80%, 81%, 82%, 83%, 84%, 85%, 86%, 87%, 88%, 89%, 90%, 91%, 92%, 93%, 94%, 95%, 96%, 97%, 98%, 99% or 100% amino acid sequence identity to:
   [0389] (i) a Conserved Enolase N Domain as represented by SEQ ID NO: 235 with a Pfam accession reference PF00113; and to
   [0390] (ii) a Conserved Enolase C Domain as represented by SEQ ID NO: 236 with a Pfam accession reference PF03952; and optionally
   [0391] (iii) having Enolase (2-phospho-D-glycerate hydro-lyase) activity and/or
   [0392] (iv) selecting for plants having enhanced yield-related traits.
[0393] 2. Method according to item 1, wherein said Enolase polypeptide comprises one or more of the following motifs:
   [0394] (i) Motif 12: SIE(D/Q)PFD (SEQ ID NO: 237);
   [0395] (ii) Motif 13: VGDDLL (SEQ ID NO: 238);
   [0396] (iii) Motif 14: GAPCR (SEQ ID NO: 239);
   [0397] (iv) Motif 15: KYNQ(L/I)LRIE (SEQ ID NO: 240), wherein X represents any amino acid; and
   [0398] wherein any amino acid may be substituted by a conserved amino acid residue according to Table 1.
[0399] 3. Method according to item 1 or 2, wherein said modulated expression is effected by introducing and expressing in a plant a nucleic acid encoding an Enolase polypeptide.
   [0400] 4. Method according to any one of items 1 to 3, wherein said nucleic acid encoding an Enolase polypeptide encodes any one of the proteins listed in Table A2 or is a portion of such a nucleic acid, or a nucleic acid capable of hybridising with such a nucleic acid.
[0401] 5. Method according to any one of items 1 to 4, wherein said nucleic acid sequence encodes an orthologue or paralogue of any of the proteins given in Table A2.
[0402] 6. Method according to any preceding item, wherein said enhanced yield-related traits comprise increased yield, preferably increased biomass and/or increased seed yield relative to control plants.
[0403] 7. Method according to any one of items 1 to 6, wherein said enhanced yield-related traits are obtained under non-stress conditions.
[0404] 8. Method according to any one of items 1 to 6, wherein said enhanced yield-related traits are obtained under conditions of drought stress.
[0405] 9. Method according to any one of items 3 to 8, wherein said nucleic acid is operably linked to any one of:
   [0406] (i) a constitutive promoter, preferably to a GOS2 promoter, most preferably to a GOS2 promoter from rice;
   [0407] (ii) a seed specific promoter, preferably to a WSI18 promoter, most preferably to a WSI18 promoter from rice;
[0408] 10. Method according to any one of items 1 to 9, wherein said nucleic acid encoding an Enolase polypeptide is of plant origin, preferably from a monocotyledonous plant, further preferably from the family Poaceae, more preferably from the genus Oryza, most preferably from Oryza sativa.
[0409] 11. Plant or part thereof, including seeds, obtainable by a method according to any one of items 1 to 10, wherein said plant or part thereof comprises a recombinant nucleic acid encoding an Enolase polypeptide.
[0410] 12. Construct comprising:
   [0411] (i) nucleic acid encoding an Enolase polypeptide as defined in items 1 or 2;
   [0412] (ii) one or more control sequences capable of driving expression of the nucleic acid sequence of (a); and optionally
   [0413] (iii) a transcription termination sequence.
[0414] 13. Construct according to item 12, wherein one of said control sequences is:
   [0415] (i) a constitutive promoter, preferably a GOS2 promoter, most preferably a GOS2 promoter from rice or
   [0416] (ii) A seed preferred promoter, preferably a WSi18 promoter, most preferably a WSI18 promoter from rice
[0417] 14. Use of a construct according to item 12 or 13 in a method for making plants having increased yield, particularly increased biomass and/or increased seed yield relative to control plants.
[0418] 15. Plant, plant part or plant cell transformed with a construct according to item 12 or 13.
[0419] 16. Method for the production of a transgenic plant having increased yield, particularly increased biomass and/or increased seed yield relative to control plants, comprising:
   [0420] (i) introducing and expressing in a plant a nucleic acid encoding an Enolase polypeptide as defined in item 1 or 2; and
   [0421] (ii) cultivating the plant cell under conditions promoting plant growth and development.
[0422] 17. Transgenic plant having increased yield, particularly increased biomass and/or increased seed yield, relative to control plants, resulting from modulated expression of a nucleic acid encoding an Enolase polypeptide as defined in item 1 or 2, or a transgenic plant cell derived from said transgenic plant.
[0423] 18. Transgenic plant according to item 11, 15 or 17, or a transgenic plant cell derived thereof, wherein said plant is a crop plant or a monocot or a cereal, such as rice, maize, wheat, barley, millet, rye, triticale, sorghum emmer, spelt, secale, einkorn, teff, milo and oats.
[0424] 19. Harvestable parts of a plant according to item 18, wherein said harvestable parts are preferably shoot biomass and/or seeds.
[0425] 20. Products derived from a plant according to item 18 and/or from harvestable parts of a plant according to item 19.
[0426] 21. Use of a nucleic acid encoding an Enolase polypeptide in increasing yield, particularly in increasing seed yield and/or shoot biomass in plants, relative to control plants.
[0427] 22. An isolated nucleic acid molecule selected from:
   [0428] (i) a nucleic acid represented by any one of SEQ ID NO: 215 and 217;
   [0429] (ii) the complement of a nucleic acid represented by any one of SEQ ID NO: 215 and 217;
   [0430] (iii) a nucleic acid encoding the polypeptide as represented by any one of SEQ ID NO: 216 and 218, preferably as a result of the degeneracy of the genetic code, said isolated nucleic acid can be derived from a polypeptide sequence as represented by any one of SEQ ID NO: 24 and 26 and further preferably confers enhanced yield-related traits relative to control plants;
   [0431] (iv) a nucleic acid having, in increasing order of preference at least 30%, 31%, 32%, 33%, 34%, 35%, 36%, 37%, 38%, 39%, 40%, 41%, 42%, 43%, 44%, 45%, 46%, 47%, 48%, 49%, 50%, 51%, 52%, 53%, 54%, 55%, 56%, 57%, 58%, 59%, 60%, 61%, 62%, 63%, 64%, 65%, 66%, 67%, 68%, 69%, 70%, 71%, 72%, 73%, 74%, 75%, 76%, 77%, 78%, 79%, 80%, 81%, 82%, 83%, 84%, 85%, 86%, 87%, 88%, 89%, 90%, 91%, 92%, 93%, 94%, 95%, 96%, 97%, 98%, or 99% sequence identity with any of the nucleic acid sequences of table A and further preferably conferring enhanced yield-related traits relative to control plants;
   [0432] (v) a nucleic acid molecule which hybridizes with a nucleic acid molecule of (i) to (iv) under stringent hybridization conditions and preferably confers enhanced yield-related traits relative to control plants;
   [0433] (vi) a nucleic acid encoding a Enolase polypeptide having, in increasing order of preference, at least 50%, 51%, 52%, 53%, 54%, 55%, 56%, 57%, 58%, 59%, 60%, 61%, 62%, 63%, 64%, 65%, 66%, 67%, 68%, 69%, 70%, 71%, 72%, 73%, 74%, 75%, 76%, 77%, 78%, 79%, 80%, 81%, 82%, 83%, 84%, 85%, 86%, 87%, 88%, 89%, 90%, 91%, 92%, 93%, 94%, 95%, 96%, 97%, 98%, or 99% sequence identity to the amino acid sequence represented by any one of SEQ ID NO: 24 and 26 and any of the other amino acid sequences in Table A and preferably conferring enhanced yield-related traits relative to control plants.
[0434] 23. In isolated polypeptide selected from:
   [0435] (i) an amino acid sequence represented by any one of SEQ ID NO: 24 and 26;
   [0436] (ii) an amino acid sequence having, in increasing order of preference, at least 50%, 51%, 52%, 53%, 54%, 55%, 56%, 57%, 58%, 59%, 60%, 61%, 62%, 63%, 64%, 65%, 66%, 67%, 68%, 69%, 70%, 71%, 72%, 73%, 74%, 75%, 76%, 77%, 78%, 79%, 80%, 81%, 82%, 83%, 84%, 85%, 86%, 87%, 88%, 89%, 90%, 91%, 92%, 93%, 94%, 95%, 96%, 97%, 98%, or 99% sequence identity to the amino acid sequence represented by any one of SEQ ID NO: 24 and 26 and any of the other amino acid sequences in Table A and preferably conferring enhanced yield-related traits relative to control plants.
   [0437] (iii) derivatives of any of the amino acid sequences given in (i) or (ii) above.
      3. Zn Transporter of Arabidopsis thaliana (ZAT)
[0438] 1. A method for enhancing yield-related traits in plants relative to control plants, comprising modulating expression in a plant of a nucleic acid encoding a ZAT-like zinc transporter polypeptide comprising in increasing order of preference at least 50%, 51%, 52%, 53%, 54%, 55%, 56%, 57%, 58%, 59%, 60%, 61%, 62%, 63%, 64%, 65%, 66%, 67%, 68%, 69%, 70%, 71%, 72%, 73%, 74%, 75%, 76%, 77%, 78%, 79%, 80%, 81%, 82%, 83%, 84%, 85%, 86%, 87%, 88%, 89%, 90%, 91%, 92%, 93%, 94%, 95%, 96%, 97%, 98%, or 99% overall sequence identity to the amino acid represented by SEQ ID NO: 248.
[0439] 2. Method according to item 1, wherein said ZAT-like zinc transporter polypeptide which when used in the construction of a phylogenetic tree, such as the one depicted in FIG. 7, clusters with the group of ZAT-like zinc transporter polypeptides comprising the amino acid sequence represented by SEQ ID NO: 248 rather than with any other group.
[0440] 3. Method according to item 1 or 2, wherein said modulated expression is effected by introducing and expressing in a plant a nucleic acid encoding a ZAT-like zinc transporter polypeptide.
[0441] 4. Method according to any preceding item, wherein said nucleic acid encoding a ZAT-like zinc transporter polypeptide encodes any one of the proteins listed in Table A3 or is a portion of such a nucleic acid, or a nucleic acid capable of hybridising with such a nucleic acid.
[0442] 5. Method according to any preceding item, wherein said nucleic acid sequence encodes an orthologue or paralogue of any of the proteins given in Table A3.
[0443] 6. Method according to any preceding item, wherein said enhanced yield-related traits comprise increased yield, preferably increased biomass and/or increased seed yield relative to control plants.
[0444] 7. Method according to any one of items 1 to 6, wherein said enhanced yield-related traits are obtained under non-stress conditions.
[0445] 8. Method according to any one of items 3 to 8, wherein said nucleic acid is operably linked to a constitutive promoter, preferably to a GOS2 promoter, most preferably to a GOS2 promoter from rice.
[0446] 9. Method according to any preceding item, wherein said nucleic acid encoding a ZAT-like zinc transporter polypeptide is of plant origin, preferably from a dicotyledonous plant, further preferably from the family Brassicaceae, more preferably from the genus Arabidopsis, most preferably from Arabidopsis thaliana.
[0447] 10. Plant or part thereof, including seeds, obtainable by a method according to any preceding item, wherein said plant or part thereof comprises a recombinant nucleic acid encoding a ZAT-like zinc transporter polypeptide.
[0448] 11. Construct comprising:
   [0449] (a) nucleic acid encoding a ZAT-like zinc transporter polypeptide as defined in item 1 or 2;
   [0450] (b) one or more control sequences capable of driving expression of the nucleic acid sequence of (a); and optionally
   [0451] (c) a transcription termination sequence.
[0452] 12. Construct according to item 11, wherein one of said control sequences is a constitutive promoter, preferably a GOS2 promoter, most preferably a GOS2 promoter from rice.
[0453] 13. Use of a construct according to item 11 or 12 in a method for making plants having increased yield, particularly increased biomass and/or increased seed yield relative to control plants.
[0454] 14. Plant, plant part or plant cell transformed with a construct according to item 11 or 12.
[0455] 15. Method for the production of a transgenic plant having increased yield, particularly increased biomass and/or increased seed yield relative to control plants, comprising:
   [0456] (i) introducing and expressing in a plant a nucleic acid encoding a ZAT-like zinc transporter polypeptide as defined in item 1 or 2; and
   [0457] (ii) cultivating the plant cell under conditions promoting plant growth and development.
[0458] 16. Transgenic plant having increased yield, particularly increased biomass and/or increased seed yield, relative to control plants, resulting from modulated expression of a nucleic acid encoding a ZAT-like zinc transporter polypeptide as defined in item 1 or 2, or a transgenic plant cell derived from said transgenic plant.
[0459] 17. Transgenic plant according to item 10, 14 or 16, or a transgenic plant cell derived thereof, wherein said plant is a crop plant or a monocot or a cereal, such as rice, maize, wheat, barley, millet, rye, triticale, sorghum emmer, spelt, secale, einkorn, teff, milo and oats.
[0460] 18. Harvestable parts of a plant according to item 17, wherein said harvestable parts are preferably shoot biomass and/or seeds.
[0461] 19. Products derived from a plant according to item 17 and/or from harvestable parts of a plant according to item 18.
[0462] 20. Use of a nucleic acid encoding a ZAT-like zinc transporter polypeptide in increasing yield, particularly in increasing seed yield and/or shoot biomass in plants, relative to control plants.

### 4. 6-Phosphogluconate Dehydrogenase (6-PGDH)

[0463] 1. A method for enhancing yield-related traits, preferably enhancing seed yield-related traits, in plants relative to control plants, comprising modulating expression in a plant of a nucleic acid sequence encoding a 6-PGDH polypeptide.
[0464] 2. A method according to item 1, wherein said 6-PGDH polypeptide comprises a protein domain having 50%, 51%, 52%, 53%, 54%, 55%, 56%, 57%, 58%, 59%, 60%, 61%, 62%, 63%, 64%, 65%, 66%, 67%, 68%, 69%, 70%, 71%, 72%, 73%, 74%, 75%, 76%, 77%, 78%, 79%, 80%, 81%, 82%, 83%, 84%, 85%, 86%, 87%, 88%, 89%, 90%, 91%, 92%, 93%, 94%, 95%, 96%, 97%, 98%, 99% or 100% sequence identity to the following domains:
   [0465] (i) the 6-phosphogluconate dehydrogenase domain located between amino acid positions 3 to 178 in SEQ ID NO: 281;
   [0466] (ii) the conserved 6-phosphogluconate dehydrogenase C-terminal domain located between amino acid positions amino acid positions 182 to 472 in SEQ ID NO: SEQ ID NO: 281,
[0467] 3. Method according to item 1 or 2, wherein said 6-PGDH polypeptide has in increasing order of preference at least 50%, 51%, 52%, 53%, 54%, 55%, 56%, 57%, 58%, 59%, 60%, 61%, 62%, 63%, 64%, 65%, 66%, 67%, 68%, 69%, 70%, 71%, 72%, 73%, 74%, 75%, 76%, 77%, 78%, 79%, 80%, 81%, 82%, 83%, 84%, 85%, 86%, 87%, 88%, 89%, 90%, 91%, 92%, 93%, 94%, 95%, 96%, 97%, 98%, 99% or 100% amino acid sequence identity to the 6-PGDH polypeptide as represented by SEQ ID NO: 281.
[0468] 4. Method according to any preceding item, wherein said nucleic acid sequence encoding a 6-PGDH polypeptide is represented by the nucleic acid sequence of SEQ ID NO: 280 or a portion thereof, or a sequence capable of hybridising with the nucleic acid sequence of SEQ ID NO: 280 or a portion thereof.
[0469] 5. Method according to any preceding item wherein said modulated expression (preferably, increased) is effected by introducing and expressing in a plant a nucleic acid sequence encoding said 6-PGDH polypeptide.
[0470] 6. Method according to any preceding item, wherein said enhanced yield-related traits comprise one or more of: increased biomass, increased total seed yield per plant, increased number of filled seeds, increased seed filling rate and increased early vigour relative to control plants.
[0471] 7. Method according to any preceding item, wherein said modulated expression is increased expression.
[0472] 8. Method according to any preceding item, wherein said nucleic acid sequence is operably linked to a constitutive promoter, preferably to a GOS2 promoter, most preferably to a GOS2 promoter from rice.
[0473] 9. Method according to any preceding item, wherein said nucleic acid sequence encoding a 6-PGDH polypeptide is of plant origin, preferably from a dicotyledonous plant, further preferably from the family Poaceae, more preferably from Oryza sativa.
[0474] 10. Plant, part thereof (including seeds), or plant cell obtainable by a method according to any preceding item, wherein said plant, part thereof, or plant cell comprises a nucleic acid transgene encoding a 6-PGDH polypeptide.
[0475] 11. Construct comprising:
   [0476] (i) nucleic acid sequence encoding a 6-PGDH polypeptide as defined in items 1 to 3;
   [0477] (ii) one or more control sequences capable of driving expression of the nucleic acid sequence of (a); and optionally
   [0478] (iii) a transcription termination sequence.
[0479] 12. Construct according to item 11, wherein one of said control sequences is a constitutive promoter, preferably a GOS2 promoter, most preferably an GOS2 promoter from rice.
[0480] 13. Use of a construct according to any of items 11 or 12 in a method for making plants having enhanced yield-related traits, particularly increased biomass, increased total seed yield per plant, increased number of filled seeds, increased seed filling rate and increased early vigour relative to control plants.
[0481] 14. Plant, plant part or plant cell transformed with a construct according to any of items 11 or 12.
[0482] 15. Method for the production of a transgenic plant having enhanced-yield related traits relative to control plants, comprising:
   [0483] (i) introducing and expressing in a plant, plant part, or plant cell, a nucleic acid sequence encoding a 6-PGDH polypeptide as defined in items 1 to 3; and
   [0484] (ii) cultivating the plant, plant part, or plant cell under conditions promoting plant growth and development.
[0485] 16. Transgenic plant having enhanced yield-related traits, particularly increased biomass, increased total seed yield per plant, increased number of filled seeds, increased seed filling rate and increased early vigour relative to control plants, resulting from increased expression of a nucleic acid sequence encoding a 6-PGDH polypeptide as defined in items 1 to 3, or a transgenic plant cell derived from said transgenic plant.
[0486] 17. Transgenic plant according to item 10, 14 or 16, or a transgenic plant cell derived thereof, wherein said plant is a crop plant or a monocot or a cereal, such as rice, maize, wheat, barley, millet, rye, triticale, sorghum and oats.
[0487] 18. Harvestable parts of a plant comprising a nucleic acid sequence encoding a 6-PGDH polypeptide according to item 17, wherein said harvestable parts are preferably seeds.
[0488] 19. Products derived from a plant according to item 17 and/or from harvestable parts of a plant according to item 18.
[0489] 20. Use of a nucleic acid sequence encoding a 6-PGDH polypeptide in enhancing yield-related traits in plants, particularly in increased biomass, increased total seed yield per plant, increased number of filled seeds, increased seed filling rate and increased early vigour relative to control plants.

### DESCRIPTION OF FIGURES

[0490] The present invention will now be described with reference to the following figures in which:

[0491] FIG. 1 represents a multiple alignment of MSR polypeptides. The name of the polypeptide sequences in the alignment is as follows: PF61417, underscore (_), SEQ ID NO and the plant from which the sequence originates (e.g. PF61417_{—}2 Oryza).

[0492] FIG. 2 represents the binary vector for increased expression in Oryza sativa of a MSR-encoding nucleic acid under the control of a rice GOS2 promoter (pGOS2)

[0493] FIG. 3 represents of the Enolase polypeptides of Table A2.

[0494] FIG. 4 shows a phylogenetic tree of the Enolase polypeptides of Table A2.

[0495] FIG. 5 represents the binary vector for increased expression in Oryza sativa of an Enolase-encoding nucleic acid under the control of a rice GOS2 promoter (pGOS2).

[0496] FIG. 7 shows a circular phylogenetic tree of various ZAT-like zinc transporter polypeptides and related sequences. The polypeptide sequences were aligned using MUSCLE and the alignment is shown in FIG. 6. A Neighbour-Joining tree was calculated using CLUSTALW. Thompson et al. (1997) Nucleic Acids Res 25:4876-4882; Chenna et al. (2003). Nucleic Acids Res 31:3497-3500. Support for the major branching is indicated for 100 bootstrap repetitions. The circular phylogram was drawn using Dendroscope. The ZAT-like zinc transporter polypeptide of SEQ ID NO: 248 is indicated in bold. Other ZAT-like zinc transporter polypeptide sequences are those within the bracket. Examples of ZAT-like zinc transporter polypeptides useful in the methods of the present invention are those indicated within the bracket.

[0497] FIG. 8 represents the binary vector for increased expression in Oryza sativa of a ZAT-like zinc transporter polypeptide encoding nucleic acid under the control of a rice GOS2 promoter (pGOS2).

[0498] FIG. 9 represents the binary vector for increased expression in Oryza sativa of a 6-PGDH-encoding nucleic acid under the control of a rice GOS2 promoter (pGOS2::6-PGDH).

### EXAMPLES

[0499] The present invention will now be described with reference to the following examples, which are by way of illustration alone. The following examples are not intended to completely define or otherwise limit the scope of the invention.

[0500] DNA manipulation: unless otherwise stated, recombinant DNA techniques are performed according to standard protocols described in (Sambrook (2001) Molecular Cloning: a laboratory manual, 3rd Edition Cold Spring Harbor Laboratory Press, CSH, New York) or in Volumes 1 and 2 of Ausubel et al. (1994), Current Protocols in Molecular Biology, Current Protocols. Standard materials and methods for plant molecular work are described in Plant Molecular Biology Labfax (1993) by R.D.D. Croy, published by BIOS Scientific Publications Ltd (UK) and Blackwell Scientific Publications (UK).

### Example 1

### Identification of Sequences Related to the Nucleic Acid Sequence Used in the Methods of the Invention

[0501] Sequences (full length cDNA, ESTs or genomic) related to the nucleic acid sequence used in the methods of the present invention were identified amongst those maintained in the Entrez Nucleotides database at the National Center for Biotechnology Information (NCBI) and other databases using database sequence search tools, such as the Basic Local Alignment Tool (BLAST) (Altschul et al. (1990) J. Mol. Biol. 215:403-410; and Altschul et al. (1997) Nucleic Acids Res. 25:3389-3402). The program is used to find regions of local similarity between sequences by comparing nucleic acid or polypeptide sequences to sequence databases and by calculating the statistical significance of matches. For example, the polypeptide encoded by the nucleic acid used in the present invention was used for the TBLASTN algorithm, with default settings and without the filter for low complexity sequences. The output of the analysis was viewed by pairwise comparison, and ranked according to the probability score (E-value), where the score reflect the probability that a particular alignment occurs by chance (the lower the E-value, the more significant the hit). In addition to E-values, comparisons were also scored by percentage identity. Percentage identity refers to the number of identical nucleotides (or amino acids) between the two compared nucleic acid (or polypeptide) sequences over a particular length.

### 1.1. Methionine Sulfoxide Reductase (Msr)

[0502] Table A1 provides a list of nucleic acid sequences and encoded proteins thereof related to the nucleic acid sequence used in the methods of the present invention.

TABLE A1
Examples of MSR nucleic acids and polypeptides:

| | Nucleic acid | Polypeptide |
|---|---|---|
| Name | SEQ ID NO: | SEQ ID NO: |
| OS_MSR | 1 | 2 |
| AT1G53670.1 | 3 | 4 |
| AT2G18030.1 | 5 | 6 |
| AT4G04800.1 | 7 | 8 |
| AT4G04810.1 | 9 | 10 |
| AT4G04830.1 | 11 | 12 |
| AT4G04840.1 | 13 | 14 |
| AT4G21830.1 | 15 | 16 |
| AT4G21840.1 | 17 | 18 |
| AT4G21850.1 | 19 | 20 |
| AT4G21860.1 | 21 | 22 |
| AT4G25130.1 | 23 | 24 |
| AT5G07460.1 | 25 | 26 |
| AT5G07470.1 | 27 | 28 |
| AT5G61640.1 | 29 | 30 |
| Gm_Hyseq_1 | 31 | 32 |
| Gm_Hyseq_2 | 33 | 34 |
| Hv_BI953981 | 35 | 36 |
| Hv_CD054996 | 37 | 38 |
| Hv_TA34992_4513 | 39 | 40 |
| Lu_Hyseq_Linseed | 41 | 42 |
| Mt_TA23181_3880 | 43 | 44 |
| Mt_TA27592_3880 | 45 | 46 |
| Os03g0360700 | 47 | 48 |
| Os04g0482000 | 49 | 50 |
| Os05g0404200 | 51 | 52 |
| Os06g0138100 | 53 | 54 |
| Os06g0472000 | 55 | 56 |
| Os10g0563600 | 57 | 58 |
| Ot_29409 | 59 | 60 |
| Ot_36412_1400010063 | 61 | 62 |
| Pp_TA15842_3218 | 63 | 64 |
| Pp_TA19162_3218 | 65 | 66 |
| Pp_TA19978_3218 | 67 | 68 |
| Pp_TA27864_3218 | 69 | 70 |
| Pp_TA27941_3218 | 71 | 72 |
| Pt_scaff_13972.1#1 | 73 | 74 |
| Pt_scaff_15051.1#1 | 75 | 76 |
| Pt_scaff_20878.2#1 | 77 | 78 |
| Pt_scaff_232.6#1 | 79 | 80 |
| Pt_scaff_VII.1214#1 | 81 | 82 |
| Pt_scaff_VIII.1881#1 | 83 | 84 |
| Pt_scaff_XI.858#1 | 85 | 86 |
| Pt_scaff_XII.839#1 | 87 | 88 |
| Pt_scaff_XV.665 | 89 | 90 |
| Pt_scaff_XV.916#1 | 91 | 92 |
| Ta_CD879384 | 93 | 94 |
| Ta_CV781803 | 95 | 96 |
| Ta_TA50939_4565 | 97 | 98 |
| Zm\TA195613_4577 | 99 | 100 |
| Mt_pilin | 101 | 102 |
| AT4G21850.2#1 | 103 | 104 |
| AT4G21860.2#1 | 105 | 106 |
| BN06MC01167_41893809@1164#1 | 107 | 108 |
| BN06MC07870_42642598@7850#1 | 109 | 110 |
| BN06MC22817_48769979@22736#1 | 111 | 112 |
| BN06MC29626_51364980@29502#1 | 113 | 114 |
| BN06MC33493_51487934@33340#1 | 115 | 116 |
| GM06MC03057_49779101@3032#1 | 117 | 118 |
| GM06MC07468_50798375@7402#1 | 119 | 120 |
| GM06MC28560_sc16h05@27910#1 | 121 | 122 |
| GM06MC34053_sn39h09@33265#1 | 123 | 124 |
| GM06MSsr78c11.f_46805437@69254#1 | 125 | 126 |
| CV062108#1 | 127 | 128 |
| TA38065_4513#1 | 129 | 130 |
| TA19984_3880#1 | 131 | 132 |
| TA27217_3880#1 | 133 | 134 |
| TA16015_3218#1 | 135 | 136 |
| TA19653_3218#1 | 137 | 138 |
| TA25821_3218#1 | 139 | 140 |
| CD002141#1 | 141 | 142 |
| DB702640#1 | 143 | 144 |
| TA38052_4081#1 | 145 | 146 |
| TA39048_4081#1 | 147 | 148 |
| TA39049_4081#1 | 149 | 150 |
| TA51472_4081#1 | 151 | 152 |
| BQ483809#1 | 153 | 154 |
| CJ539550#1 | 155 | 156 |
| CV772165#1 | 157 | 158 |
| TA81419_4565#1 | 159 | 160 |
| TA81420_4565#1 | 161 | 162 |
| TA83397_4565#1 | 163 | 164 |
| ZM07MC14597_60377151@14563#1 | 165 | 166 |
| ZM07MC28955_BFb0044H16@28867#1 | 167 | 168 |
| ZM07MC36516_57850824@36391#1 | 169 | 170 |
| ZM07MSbpsHQ_68592530.r01@47392#1 | 171 | 172 |

1.2. Enolase (2-phospho-D-glycerate hydrolase)

[0503] Table A2 provides a list of nucleic acid sequences and encoded polypeptides thereof related to the Enolase nucleic acid

TABLE A2
Examples of ENOLASE nucleic acids and polypeptides:

| | Nucleic acid | Polypeptide |
|---|---|---|
| Name | SEQ ID NO: | SEQ ID NO: |
| Enolase | 193 | 194 |
| Os\LOC_Os03g14450.1 | 195 | 196 |
| Os\LOC_Os03g14450.2 | 197 | 198 |
| Os\LOC_Os03g15950.1 | 199 | 200 |
| Os\LOC_Os06g04510.1 | 201 | 202 |
| Os\LOC_Os09g20820.1 | 203 | 204 |
| Os\LOC_Os10g08550 | 205 | 206 |
| Zm\Enolase_1 | 207 | 208 |
| Zm\Enolase_3 | 209 | 210 |
| Zm_Enolase_2 | 211 | 212 |
| Hv\Enolase | 213 | 214 |
| Gm\Enolase\Hyseq | 215 | 216 |
| Gm\Enolase\Hyseq_2 | 217 | 218 |
| AT1G74030 | 219 | 220 |
| AT2G29560 | 221 | 222 |
| AT2G36530.1 | 223 | 224 |
| Pt\scaff_28.296 | 225 | 226 |
| Pt\scaff_IX.1243 | 227 | 228 |
| Pt\scaff_XII.488 | 229 | 230 |
| Pt\scaff_XV.1093 | 231 | 232 |
| Ot\Enolase | 233 | 234 |

1.3. Zn Transporter of Arabidopsis thaliana (ZAT)

[0504] Table A3 provides a list of nucleic acid sequences related to SEQ ID NO: 246

TABLE A3
Examples of ZAT-like zinc transporter nucleic acids and polypeptides:

| | | Nucleic acid | Polypeptide |
|---|---|---|---|
| Name | Plant source | SEQ ID NO | SEQ ID NO: |
| AT3G58810 | Arabidopsis thaliana | 249 | 250 |
| AT3G61940 | Arabidopsis thaliana | 251 | 252 |
| TA2425 | Cathamus tinctorius | 253 | 254 |
| AF197329 | Eucalyptus grandis | 255 | 256 |
| TA6615 | Ipomoea nil | 257 | 258 |
| TA8245 | Nicotiana benthamiana | 259 | 260 |
| TA14631 | Nicotiana tabacum | 261 | 262 |
| I910 | Populus trichocarpa | 263 | 264 |
| II672 | Populus trichocarpa | 265 | 266 |
| XI272 | Populus trichocarpa | 267 | 268 |
| XIV.515 | Populus trichocarpa | 269 | 270 |
| Os05g03780 | Oryza sativa | 271 | 272 |
| TA62 | Thlaspi caerulescens | 273 | 274 |
| TA176521 | Zea mays | 275 | 276 |

[0505] In some instances, sequences were tentatively assembled and publicly disclosed by research institutions, such as The Institute for Genomic Research (TIGR). The Eukaryotic Gene Orthologs (EGO) database was used to identify such sequences by performing a keyword search or by using the BLAST algorithm with the nucleic acid or polypeptide sequence of interest.

### 1.4. 6-Phosphogluconate Dehydrogenase (6-PGDH)

[0506] Table A4 provides a list of nucleic acids and polypeptides (homologous to SEQ ID NO: 281) useful in the invention.

TABLE A4
Examples 6-PGDH nucleic acids and polypeptides:

| | Nucleic acid | Polypeptide |
|---|---|---|
| Name | SEQ ID NO: | SEQ ID NO: |
| A. formosa_TA10107_338618 | 286 | 287 |
| A. formosa_TA10178_338618 | 288 | 289 |
| A. formosa_TA11596_338618 | 290 | 291 |
| A. thaliana_AT1G64190.1 | 292 | 293 |
| A. thaliana_AT3G02360.1 | 294 | 295 |
| A. thaliana_AT5G41670.1 | 296 | 297 |
| B. distachyon_TA154_15368 | 298 | 299 |
| C. elegans_NM_069597 | 300 | 301 |
| C. reinhardtii_192597 | 302 | 303 |
| C. sinensis_TA13778_2711 | 304 | 305 |
| D. melanogatser_NM_057512 | 306 | 307 |
| D. rerio_AY391449 | 308 | 309 |
| E. coli_AF176373 | 310 | 311 |
| E. gracilis_AB425328 | 312 | 313 |
| G. max_TA45618_3847 | 314 | 315 |
| G. raimondii_TA9789_29730 | 316 | 317 |
| H. vulgare_TA28670_4513 | 318 | 319 |
| L. digitata_AJ130772 | 320 | 321 |
| M. domestica_TA26246_3750 | 322 | 323 |
| M. sativa_U18239 | 324 | 325 |
| M. truncatula_TA20191_3880 | 326 | 327 |
| N. punctiforme_CP001037 | 328 | 329 |
| N. tabacum_TA13708_4097 | 330 | 331 |
| O. basilicum_TA383_39350 | 332 | 333 |
| O. lucimarinus_32825 | 334 | 335 |
| O. sativa_Os06g0111500 | 336 | 337 |
| O. sativa_Os11g0484500 | 338 | 339 |
| P. patens_109688 | 340 | 341 |
| P. patens_183544 | 342 | 343 |
| P. persica_TA3702_3760 | 344 | 345 |
| P. taeda_TA3907_3352 | 346 | 347 |
| P. taeda_TA3914_3352 | 348 | 349 |
| P. taeda_TA6813_3352 | 350 | 351 |
| P. trichocarpa_640402 | 352 | 353 |
| P. trichocarpa_656743 | 354 | 355 |
| P. trichocarpa_799988 | 356 | 357 |
| P. trichocarpa_TA13860_3694 | 358 | 359 |
| P. tricornutum_13356 | 360 | 361 |
| P. tricornutum_26934 | 362 | 363 |
| P. vulgaris_TA3361_3885 | 364 | 365 |
| S. bicolor_TA22020_4558 | 366 | 367 |
| S. cerevisiae_YGR256W | 368 | 369 |
| S. lycopersicum_TA40141_4081 | 370 | 371 |
| S. oleracea_chloro | 372 | 373 |
| S. oleracea_cyto | 374 | 375 |
| S. tuberosum_TA30318_4113 | 376 | 377 |
| T. pseudonana_33343 | 378 | 379 |
| V. carteri_109207 | 380 | 381 |
| V. vinifera_TA38655_29760 | 382 | 383 |
| Z. mays_TA9675_4577999 | 384 | 385 |

### Example 2

### Alignment of Sequences Related to the Polypeptide Sequences Used in the Methods of the Invention

### 2.1. Methionine Sulfoxide Reductase (Msr)

[0507] alignment of polypeptide sequences was performed using the alignX programme from the Vector NTI (Invitrogen) which is based on the popular Clustal W algorithm of progressive alignment (Thompson et al. (1997) Nucleic Acids Res 25:4876-4882; Chenna et al. (2003). Nucleic Acids Res 31:3497-3500). Default values are for the gap open penalty of 10, for the gap extension penalty of 0,1 and the selected weight matrix is Blosum 62 (if polypeptides are aligned). The MSR polypeptides are aligned in FIG. 1. The position of motifs 1 to 4 is indicated on the consensus sequence (MSRA type). The position of motifs 5 to 11 is indicated on the Medicago truncatula sequence PF61417_{—}102_{—}Medicago (MSRB type).

2.2. Enolase (2-phospho-D-glycerate hydrolase)

[0508] Alignment of polypeptide sequences was performed using the AlignX programme from the Vector NTI (Invitrogen) which is based on the popular Clustal W algorithm of progressive alignment (Thompson et al. (1997) Nucleic Acids Res 25:4876-4882; Chenna et al. (2003). Nucleic Acids Res 31:3497-3500). Default values were for the gap open penalty of 10, for the gap extension penalty of 0,1 and the selected weight matrix was Blosum 62 (if polypeptides were aligned). Sequence conservation among ENOLASE polypeptides is essentially conseved along the Enolase domain. The consensus sequences shows highly conserved amino acid amongst ENOLASE polypeptides. In the consensus sequence, empty spaces between amino acid represent any amino acid. The ENOLASE polypeptides are aligned in FIG. 4.

[0509] A phylogenetic tree of ENOLASE polypeptides (FIG. 4) was constructed using a neighbour-joining clustering algorithm as provided in the AlignX programme from the Vector NTI (Invitrogen).

2.3. Zn Transporter of Arabidopsis thaliana (ZAT)

[0510] The alignment of ZAT-like zinc transporter polypeptides and other sequences was performed as described in FIGS. 6 and 7 herein. A phylogenetic tree of ZAT polypeptides (FIG. 7) was also constructed as described.

### 2.4. 6-Phosphogluconate Dehydrogenase (6-PGDH)

[0511] Alignment of polypeptide sequences is performed using the AlignX programme from the Vector NTI package (Invitrogen) which is based on the popular Clustal W algorithm of progressive alignment (Thompson et al. (1997) Nucleic Acids Res 25:4876-4882; Chenna et al. (2003). Nucleic Acids Res 31:3497-3500). Default values are for the gap open penalty of 10, for the gap extension penalty of 0,1 and the selected weight matrix is Blosum 62 (if polypeptides are aligned). Minor manual editing may be done to further optimise the alignment.

[0512] FIG. 9 shows the alignment of 6-PGDH polypeptide sequences useful in the methods of the invention.

### Example 3

### Calculation of Global Percentage Identity Between Polypeptide Sequences Useful in Performing the Methods of the Invention

### 3.1. Methionine Sulfoxide Reductase (Msr)

[0513] Global percentages of similarity and identity between full length polypeptide sequences useful in performing the methods of the invention were determined using one of the methods available in the art, the MatGAT (Matrix Global Alignment Tool) software (BMC Bioinformatics. 2003 4:29. MatGAT: an application that generates similarity/identity matrices using protein or DNA sequences. Campanella J J, Bitincka L, Smalley J; software hosted by Ledion Bitincka). MatGAT software generates similarity/identity matrices for DNA or protein sequences without needing pre-alignment of the data. The program performs a series of pair-wise alignments using the Myers and Miller global alignment algorithm (with a gap opening penalty of 12, and a gap extension penalty of 2), calculates similarity and identity using for example Blosum 62 (for polypeptides), and then places the results in a distance matrix. Sequence similarity is shown in the bottom half of the dividing line and sequence identity is shown in the top half of the diagonal dividing line.

[0514] Parameters used in the comparison were:
[0515] Scoring matrix: Blosum62
[0516] First Gap: 12
[0517] Extending gap: 2

[0518] Results of the software analysis are shown in Table B1 for the global similarity and identity over the full length of the polypeptide sequences. Percentage identity is given above the diagonal and percentage similarity is given below the diagonal.

[0519] The percentage identity between the MSR polypeptide sequences useful in performing the methods of the invention can be as low as 13.3% amino acid identity compared to SEQ ID NO: 2 or 12.6% to SEQ ID NO: 102.

TABLE B1
MatGAT results for global similarity and identity over the full length of the polypeptide sequences.

| | | 1 | 2 | 3 | 4 | 5 | 6 | 7 | 8 | 9 | 10 | 11 |
|---|---|---|---|---|---|---|---|---|---|---|---|---|
| 1. | AT1G53670.1 | | 14.5 | 9.8 | 11.6 | 19.6 | 16.7 | 12 | 14.9 | 13.1 | 19.8 | 16.2 |
| 2. | AT2G18030.1 | 29.1 | | 26.7 | 28.1 | 25 | 24.5 | 31.4 | 27.9 | 30.1 | 26.5 | 25.2 |
| 3. | CDSXXXX | 25.9 | 39 | | 66.8 | 58.5 | 34.9 | 74.1 | 72.7 | 59.9 | 77.9 | 32.6 |
| 4. | Gm_Hyseq_1 | 26.2 | 43.7 | 76 | | 59.9 | 35.1 | 69.4 | 70.6 | 57.1 | 54.6 | 29.9 |
| 5. | Gm_Hyseq_2 | 32.1 | 44.2 | 66.8 | 70.2 | | 28.6 | 61.4 | 66 | 51.3 | 61 | 26.8 |
| 6. | Hv_CD054996 | 26.2 | 38.6 | 49.8 | 49.8 | 41.1 | | 36.1 | 36.4 | 37.9 | 27.3 | 24.2 |
| 7. | Lu_Hyseq_Linseed | 27.5 | 42.5 | 84.4 | 76.9 | 69.8 | 56.4 | | 77 | 63.1 | 57.8 | 32.6 |
| 8. | Mt_TA23181_3880 | 28.7 | 39.4 | 83.4 | 81.4 | 72.5 | 56.4 | 87.3 | | 62.3 | 56.7 | 31.4 |
| 9. | Mt_TA27592_3880 | 29.7 | 41.3 | 68.8 | 66.1 | 56.6 | 56.6 | 74 | 73.3 | | 47.5 | 28.8 |
| 10. | Os10g0563600 | 29.7 | 41.1 | 77.9 | 65.8 | 74.3 | 38.8 | 65.8 | 65 | 54.4 | | 27.9 |
| 11. | Ot_36412_1400010063 | 30.7 | 39.3 | 40.5 | 41.2 | 44.2 | 38.1 | 43.2 | 42.8 | 38.9 | 41.1 | |
| 12. | Pp_TA15842_3218 | 28.2 | 39 | 61.5 | 60.6 | 49.8 | 58.5 | 61.8 | 65.3 | 61.7 | 47.5 | 38.5 |
| 13. | Ta_CV781803 | 29.8 | 38.2 | 63.3 | 64.7 | 54 | 49.1 | 62.8 | 63.8 | 61.5 | 52.9 | 42 |
| 14. | Zm\TA195613_4577 | 30.7 | 73.6 | 40.6 | 44.7 | 40.8 | 40.2 | 40.6 | 41.4 | 41 | 40.3 | 40.9 |
| 15. | B. napus_BN06MC22817 | 50.2 | 33.5 | 30.8 | 29.9 | 29.8 | 28.4 | 28 | 29.4 | 24.6 | 23.2 | 29.2 |
| 16. | G. max_GM06MC34053 | 76.7 | 28.7 | 26.3 | 29.4 | 27.2 | 24.8 | 29.9 | 30.2 | 30.7 | 29.3 | 25.3 |
| 17. | M. truncatula_TA19984_3880#1 | 51 | 29.5 | 28.8 | 29.4 | 27.2 | 30.2 | 34.3 | 35.6 | 26.5 | 24.3 | 27.6 |
| 19. | P. patens_TA25821_3218#1 | 41.6 | 21.7 | 23.4 | 27.1 | 21.5 | 26.8 | 25 | 23.8 | 21.9 | 20.5 | 24.1 |
| 20. | S. lycopersicum_DB702640#1 | 65.8 | 26.8 | 28.3 | 23.5 | 24.2 | 26.2 | 24 | 23.8 | 28.1 | 22.4 | 21.8 |
| 21. | T. aestivum_BQ483809#1 | 47.9 | 26.4 | 29.8 | 32.6 | 24.9 | 29.3 | 32.6 | 33 | 26.5 | 25.5 | 31.5 |
| 18. | M. truncatula_TA27217_3880#1 | 70.3 | 28 | 31.6 | 29.9 | 30.2 | 34.4 | 28.8 | 32.5 | 32.1 | 28.9 | 23.7 |

| | | 12 | 13 | 14 | 15 | 16 | 17 | 18 | 19 | 20 | 21 |
|---|---|---|---|---|---|---|---|---|---|---|---|
| 1. | AT1G53670.1 | 14.4 | 15.9 | 17.6 | 37.4 | 58.9 | 34.8 | 56.5 | 29.9 | 56.9 | 33 |
| 2. | AT2G18030.1 | 28.3 | 27.1 | 61.3 | 17.6 | 16.4 | 16.1 | 13.7 | 13.3 | 13.3 | 16.3 |
| 3. | CDSXXXX | 51.7 | 50.4 | 29.3 | 14.3 | 11.6 | 15.6 | 12.8 | 14.8 | 16.6 | 16.4 |
| 4. | Gm_Hyseq_1 | 49.8 | 49.8 | 30.8 | 14.4 | 11.8 | 15 | 12.2 | 15.4 | 12.6 | 15.8 |
| 5. | Gm_Hyseq_2 | 42.3 | 37.9 | 24.7 | 20.3 | 14.3 | 17.1 | 16.6 | 12.4 | 15.5 | 16.6 |
| 6. | Hv_CD054996 | 43.8 | 34.2 | 27.1 | 13.3 | 13.9 | 14.9 | 18.1 | 15.7 | 17.6 | 16.1 |
| 7. | Lu_Hyseq_Linseed | 53.9 | 47 | 29 | 15.2 | 12.3 | 19.4 | 12.3 | 10.6 | 14.7 | 17 |
| 8. | Mt_TA23181_3880 | 55.9 | 46.8 | 28.6 | 16.4 | 17.4 | 19.2 | 14.6 | 15.5 | 15.8 | 17.2 |
| 9. | Mt_TA27592_3880 | 53.1 | 50 | 28.6 | 13.7 | 12.3 | 14.8 | 11 | 15.3 | 14.7 | 14.1 |
| 10. | Os10g0563600 | 40.3 | 40.9 | 26.8 | 17.9 | 16.2 | 13.1 | 15 | 13.3 | 13.7 | 13.7 |
| 11. | Ot_36412_1400010063 | 28 | 31.1 | 26.2 | 15.8 | 12.7 | 17.1 | 12.4 | 16.3 | 14.4 | 19.4 |
| 12. | Pp_TA15842_3218 | | 43.6 | 27.4 | 12.6 | 13.6 | 12.8 | 12.7 | 16.8 | 14.3 | 12.1 |
| 13. | Ta_CV781803 | 56.9 | | 29.4 | 14 | 13.7 | 12.6 | 16.5 | 14.5 | 14.5 | 15.9 |
| 14. | Zm\TA195613_4577 | 40.2 | 41 | | 15.3 | 20.6 | 16.1 | 17.5 | 13.5 | 15.5 | 14.1 |
| 15. | B. napus_BN06MC22817 | 28 | 26.6 | 30.7 | | 33.3 | 59.7 | 33.2 | 53.6 | 31.3 | 57.8 |
| 16. | G. max_GM06MC34053 | 32.2 | 24.3 | 33.2 | 46.9 | | 32.2 | 71.5 | 30.1 | 62.4 | 35.7 |
| 17. | M. truncatula_TA19984_3880#1 | 29.1 | 25.7 | 29.1 | 72 | 49 | | 33 | 54.2 | 34.4 | 60.9 |
| 19. | P. patens_TA25821_3218#1 | 27.4 | 23.4 | 21.3 | 57.8 | 41.6 | 63.5 | 40.1 | | 41.8 | 46.5 |
| 20. | S. lycopersicum_DB702640#1 | 29.2 | 27.5 | 28.3 | 42.7 | 67.8 | 48.1 | 65.1 | 56.8 | | 31.7 |
| 21. | T. aestivum_BQ483809#1 | 23.7 | 23.4 | 28.3 | 70.2 | 47.9 | 72.6 | 48.8 | 55.3 | 41.4 | |
| 18. | M. truncatula_TA27217_3880#1 | 31.1 | 28.4 | 31.6 | 50.9 | 82.1 | 48.6 | | 28.7 | 58.5 | 35.6 |

3.2. Enolase (2-phospho-D-glycerate hydrolase)

[0520] Global percentages of similarity and identity between full length polypeptide sequences useful in performing the methods of the invention were determined using one of the methods available in the art, the MatGAT (Matrix Global Alignment Tool) software (BMC Bioinformatics. 2003 4:29. MatGAT: an application that generates similarity/identity matrices using protein or DNA sequences. Campanella J J, Bitincka L, Smalley J; software hosted by Ledion Bitincka). MatGAT software generates similarity/identity matrices for DNA or protein sequences without needing pre-alignment of the data. The program performs a series of pair-wise alignments using the Myers and Miller global alignment algorithm (with a gap opening penalty of 12, and a gap extension penalty of 2), calculates similarity and identity using for example Blosum 62 (for polypeptides), and then places the results in a distance matrix. Sequence similarity is shown in the bottom half of the dividing line and sequence identity is shown in the top half of the diagonal dividing line.

[0521] Parameters used in the comparison were:
[0522] Scoring matrix: Blosum62
[0523] First Gap: 12
[0524] Extending gap: 2

[0525] Results of the software analysis are shown in Table B2 for the global similarity and identity over the full length of the polypeptide sequences. Percentage identity is given above the diagonal and percentage similarity is given below the diagonal.

[0526] The percentage identity between the ENOLASE polypeptide sequences of Table A2 can be as low as 45.9% amino acid identity compared to SEQ ID NO: 194.

TABLE B2
MatGAT results for global similarity and identity over the full length of the polypeptide sequences.

| | | 1 | 2 | 3 | 4 | 5 | 6 | 7 | 8 | 9 | 10 | 11 |
|---|---|---|---|---|---|---|---|---|---|---|---|---|
| 1. | Enolase\TM | | 92.9 | 87.4 | 60.9 | 51.5 | 89.0 | 90.1 | 97.1 | 89.5 | 53.5 | 96.0 |
| 2. | Os_LOC_Os 10g08550 | 92.9 | | 81.3 | 62.5 | 52.1 | 82.7 | 83.8 | 90.2 | 83.1 | 56.1 | 89.2 |
| 3. | AT2G36530_1 | 93.7 | 87.1 | | 60.8 | 52.3 | 88.3 | 86.5 | 88.6 | 86.3 | 53.4 | 88.6 |
| 4. | AT1G74030 | 75.5 | 77.3 | 74.4 | | 51.7 | 61.4 | 61.7 | 60.6 | 61.7 | 70.0 | 60.6 |
| 5. | AT2G29560 | 68.2 | 69.2 | 68.4 | 70.4 | | 51.4 | 52.4 | 51.1 | 50.8 | 44.7 | 51.3 |
| 6. | Gm_Enolase_Hyseq_2 | 94.6 | 87.9 | 93.7 | 74.6 | 68.0 | | 89.0 | 88.6 | 87.4 | 54.1 | 88.3 |
| 7. | Gm_Enolase_Hyseq | 96.4 | 89.6 | 93.0 | 76.1 | 68.6 | 95.7 | | 90.1 | 89.2 | 53.3 | 89.7 |
| 8. | Hv_Enolase | 98.2 | 91.3 | 93.7 | 75.1 | 67.8 | 93.7 | 96.2 | | 89.7 | 53.3 | 96.6 |
| 9. | Zm_Enolase_1 | 94.8 | 88.1 | 91.7 | 75.5 | 67.6 | 91.9 | 94.2 | 94.2 | | 53.5 | 89.5 |
| 10. | Zm_Enolase_2 | 63.8 | 67.4 | 63.3 | 78.4 | 61.3 | 62.9 | 64.0 | 63.5 | 63.1 | | 53.3 |
| 11. | Zm_Enolase_1 | 98.2 | 91.3 | 93.7 | 75.1 | 67.6 | 94.6 | 95.7 | 98.7 | 95.1 | 63.8 | |
| 12. | Ot_Enolase | 75.9 | 78.2 | 76.3 | 75.9 | 75.7 | 77.2 | 77.0 | 75.5 | 75.7 | 66.7 | 75.7 |
| 13. | Pt_scaff_IX_1243 | 22.0 | 23.1 | 21.6 | 22.9 | 33.1 | 21.2 | 22.0 | 22.0 | 21.1 | 21.4 | 22.0 |
| 14. | Pt_scaff_28_296 | 88.8 | 87.5 | 88.1 | 74.4 | 68.8 | 89.6 | 89.2 | 87.7 | 86.9 | 62.8 | 88.3 |
| 15. | Pt_scaff_XII_488 | 71.9 | 74.5 | 71.7 | 88.9 | 67.6 | 70.9 | 72.5 | 71.5 | 71.7 | 78.6 | 71.9 |
| 16. | Pt_scaff_XV_1093 | 95.5 | 88.8 | 93.0 | 74.8 | 67.6 | 94.6 | 98.0 | 95.1 | 95.1 | 63.1 | 95.5 |
| 17. | Os_LOC_Os09g20820_1 | 75.2 | 78.1 | 73.5 | 88.7 | 68.5 | 73.9 | 75.4 | 74.9 | 73.9 | 79.9 | 74.9 |
| 18. | Os_LOC_Os03g14450_2 | 85.4 | 79.4 | 83.3 | 66.2 | 59.2 | 82.4 | 84.3 | 85.2 | 83.0 | 55.9 | 86.1 |
| 19. | Os_LOC_Os03g14450_1 | 97.8 | 90.8 | 94.2 | 74.8 | 67.4 | 94.6 | 96.0 | 97.8 | 94.8 | 63.8 | 98.4 |
| 20. | Os_LOC_Os03g15950_1 | 63.0 | 65.2 | 65.1 | 67.6 | 81.6 | 64.2 | 64.2 | 63.0 | 62.6 | 59.0 | 62.6 |
| 21. | Os_LOC_Os06g04510_1 | 95.1 | 88.3 | 91.7 | 75.3 | 66.9 | 92.4 | 94.8 | 94.8 | 98.2 | 63.5 | 95.5 |

| | | 12 | 13 | 14 | 15 | 16 | 17 | 18 | 19 | 20 | 21 |
|---|---|---|---|---|---|---|---|---|---|---|---|
| 1. | Enolase\TM | 65.9 | 15.3 | 83.5 | 59.6 | 91.0 | 61.7 | 82.1 | 95.1 | 45.9 | 89.9 |
| 2. | Os_LOC_Os 10g08550 | 66.3 | 17.0 | 77.9 | 60.6 | 84.6 | 63.0 | 76.5 | 88.3 | 47.0 | 83.5 |
| 3. | AT2G36530_1 | 66.0 | 16.0 | 82.6 | 59.5 | 88.8 | 60.6 | 76.6 | 87.9 | 47.2 | 86.3 |
| 4. | AT1G74030 | 61.1 | 15.8 | 58.4 | 80.3 | 61.7 | 79.4 | 52.4 | 60.4 | 46.9 | 61.9 |
| 5. | AT2G29560 | 58.3 | 31.2 | 49.7 | 49.5 | 52.1 | 50.7 | 43.9 | 51.0 | 63.8 | 51.3 |
| 6. | Gm_Enolase_Hyseq_2 | 66.2 | 16.0 | 85.4 | 60.5 | 88.3 | 62.8 | 76.8 | 89.2 | 46.2 | 88.6 |
| 7. | Gm_Enolase_Hyseq | 65.3 | 16.0 | 84.1 | 59.8 | 93.5 | 62.1 | 78.2 | 89.7 | 46.8 | 90.1 |
| 8. | Hv_Enolase | 65.5 | 15.3 | 82.7 | 59.4 | 91.7 | 61.5 | 82.1 | 95.3 | 45.5 | 90.6 |
| 9. | Zm_Enolase_1 | 66.3 | 15.3 | 82.7 | 60.4 | 90.4 | 62.3 | 78.5 | 90.1 | 45.9 | 95.5 |
| 10. | Zm_Enolase_2 | 54.0 | 15.5 | 51.3 | 70.8 | 53.0 | 76.0 | 46.0 | 53.4 | 42.3 | 54.2 |
| 11. | Zm_Enolase_1 | 64.4 | 15.7 | 83.5 | 59.4 | 91.3 | 61.5 | 82.7 | 95.7 | 45.9 | 90.8 |
| 12. | Ot_Enolase | | 20.9 | 63.0 | 57.8 | 65.9 | 62.0 | 58.4 | 65.6 | 53.0 | 65.7 |
| 13. | Pt_scaff_IX_1243 | 27.0 | | 14.6 | 15.4 | 15.5 | 16.1 | 13.5 | 15.6 | 23.0 | 15.7 |
| 14. | Pt_scaff_28_296 | 77.2 | 19.7 | | 57.3 | 84.6 | 58.8 | 72.5 | 83.3 | 44.3 | 83.1 |
| 15. | Pt_scaff_XII_488 | 73.5 | 22.3 | 71.3 | | 59.6 | 78.5 | 51.0 | 59.5 | 45.5 | 60.8 |
| 16. | Pt_scaff_XV_1093 | 76.5 | 21.3 | 90.0 | 71.9 | | 60.9 | 79.8 | 91.3 | 45.5 | 91.3 |
| 17. | Os_LOC_Os09g20820_1 | 75.5 | 21.1 | 73.3 | 86.2 | 73.9 | | 52.8 | 61.8 | 47.6 | 62.3 |
| 18. | Os_LOC_Os03g14450_2 | 68.1 | 23.4 | 77.8 | 62.8 | 83.8 | 64.7 | | 86.3 | 41.9 | 78.7 |
| 19. | Os_LOC_Os03g14450_1 | 75.9 | 21.3 | 88.3 | 71.7 | 95.7 | 74.7 | 87.2 | | 45.3 | 91.0 |
| 20. | Os_LOC_Os03g15950_1 | 72.8 | 27.2 | 63.8 | 65.4 | 63.0 | 67.0 | 56.9 | 62.1 | | 46.2 |
| 21. | Os_LOC_Os06g04510_1 | 75.5 | 20.6 | 87.3 | 71.3 | 95.7 | 74.3 | 83.2 | 95.3 | 62.3 | |

3. Zn Transporter of Arabidopsis thaliana (ZAT)

[0527] Calculation of global percentage of similarity and identity between full length polypeptide sequences is determined using one of the methods available in the art, the MatGAT (Matrix Global Alignment Tool) software (BMC Bioinformatics. 2003 4:29. MatGAT: an application that generates similarity/identity matrices using protein or DNA sequences. Campanella J J, Bitincka L, Smalley J; software hosted by Ledion Bitincka). MatGAT software generates similarity/identity matrices for DNA or protein sequences without needing pre-alignment of the data. The program performs a series of pair-wise alignments using the Myers and Miller global alignment algorithm (with a gap opening penalty of 12, and a gap extension penalty of 2), calculates similarity and identity using for example Blosum 62 (for polypeptides), and then places the results in a distance matrix.

[0528] Parameters used in the comparison are:
[0529] Scoring matrix: Blosum62
[0530] First Gap: 12
[0531] Extending gap: 2

### 3.4. 6-Phosphogluconate Dehydrogenase (6-PGDH)

[0532] Global percentages of similarity and identity between full length polypeptide sequences useful in performing the methods of the invention are determined using one of the methods available in the art, the MatGAT (Matrix Global Alignment Tool) software (BMC Bioinformatics. 2003 4:29. MatGAT: an application that generates similarity/identity matrices using protein or DNA sequences. Campanella J J, Bitincka L, Smalley J; software hosted by Ledion Bitincka). MatGAT software generates similarity/identity matrices for DNA or protein sequences without needing pre-alignment of the data. The program performs a series of pair-wise alignments using the Myers and Miller global alignment algorithm (with a gap opening penalty of 12, and a gap extension penalty of 2), calculates similarity and identity using for example Blosum 62 (for polypeptides), and then places the results in a distance matrix. Sequence similarity is shown in the bottom half of the dividing line and sequence identity is shown in the top half of the diagonal dividing line.

[0533] Parameters used in the comparison were:
[0534] Scoring matrix: Blosum62
[0535] First Gap: 12
[0536] Extending gap: 2

[0537] A MATGAT table for local alignment of a specific domain, or data on % identity/similarity between specific domains may also be generated. Table B4 shows the results on percentage identity of polypeptides useful in the method or the invention calculated with the MATGAT algorithm.

TABLE B4
MatGAT results for global similarity and identity over the full length of the polypeptide sequences.

| | | 1 | 2 | 3 | 4 | 5 | 6 | 7 | 8 | 10 | 11 | 12 | 13 | 14 |
|---|---|---|---|---|---|---|---|---|---|---|---|---|---|---|
| 1. | C. reinhardtii_192597 | | 63.4 | 83.4 | 49.2 | 47.4 | 47.7 | 45.9 | 46.3 | 41.4 | 41.8 | 46 | 39.9 | 39.6 |
| 2. | O. lucimarinus_32825 | | | 62.7 | 51 | 51.1 | 49.7 | 49.4 | 51.8 | 44.3 | 43.9 | 47 | 41.8 | 42.2 |
| 3. | V. carteri_109207 | | | | 49.4 | 48 | 48.6 | 46.8 | 46.8 | 41.5 | 42.7 | 45.5 | 40.2 | 39.9 |
| 4. | E. gracilis_AB425328 | | | | | 62.8 | 57.6 | 63.5 | 64.7 | 45.9 | 48.2 | 53.8 | 45.8 | 46.9 |
| 5. | L. digitata_AJ130772 | | | | | | 56.4 | 62.5 | 59.4 | 43.6 | 44.2 | 51.3 | 43.6 | 43.6 |
| 6. | P. tricornutum_13356 | | | | | | | 61.6 | 62.9 | 44.9 | 44.9 | 47.9 | 41.8 | 44 |
| 7. | P. tricornutum_26934 | | | | | | | | 67.7 | 46.3 | 47.3 | 50 | 47.2 | 46.6 |
| 8. | T. pseudonana_33343 | | | | | | | | | 44.8 | 46 | 49.2 | 43.1 | 44.9 |
| 10. | D. rerio_AY391449 | | | | | | | | | | 49.5 | 50.3 | 70.1 | 64.1 |
| 11. | E. coli_AF176373 | | | | | | | | | | | 57 | 49.1 | 47.1 |
| 12. | N. punctiforme_CP001037 | | | | | | | | | | | | 50.6 | 48.2 |
| 13. | C. elegans_NM_069597 | | | | | | | | | | | | | 62.5 |
| 14. | S. cerevisiae_YGR256W | | | | | | | | | | | | | |

### Example 4

### Identification of Domains Comprised in Polypeptide Sequences Useful in Performing the Methods of the Invention

[0538] The Integrated Resource of Protein Families, Domains and Sites (InterPro) database is an integrated interface for the commonly used signature databases for text- and sequence-based searches. The InterPro database combines these databases, which use different methodologies and varying degrees of biological information about well-characterized proteins to derive protein signatures. Collaborating databases include SWISS-PROT, PROSITE, TrEMBL, PRINTS, ProDom and Pfam, Smart and TIGRFAMs. Pfam is a large collection of multiple sequence alignments and hidden Markov models covering many common protein domains and families. Pfam is hosted at the Sanger Institute server in the United Kingdom. Interpro is hosted at the European Bioinformatics Institute in the United Kingdom.

### 4.1. Methionine Sulfoxide Reductase (Msr)

[0539] The results of the InterPro scan of the polypeptide sequence as represented by SEQ ID NO: 2 are presented in Table C1.

TABLE C1
InterPro scan results (major accession numbers) of the polypeptide
sequence as represented by SEQ ID NO: 2.

| | | | | Amino acid |
|---|---|---|---|---|
| | | | | coordinates |
| | Accession | | | on SEQ ID |
| Database | number | Accession name | Evalue | NO 2 (start-end) |
| Interpro | IPR002569 | PMSR | 2.9e−74 | 39-192 |
| | | (Methionine | | |
| | | sulphoxide | | |
| | | reductase A) | | |

[0540] The results of the InterPro scan of the polypeptide sequence as represented by SEQ ID NO: 102 are presented in Table C2.

TABLE C2
InterPro scan results (major accession numbers) of the polypeptide sequence as
represented by SEQ ID NO: 102.

| Interpro | | Accession | | | Amino acid |
|---|---|---|---|---|---|
| accession | | in other | | | coordinates on SEQ |
| number | Other database | database | Accession name | E value | ID NO 102 (start-end) |
| IPR011057 | SUPERFAMILY 1.69 | SSF51316 | Mss4-like | 1.50E−54 | 26-154 |
| IPR002579 | TIGRFAMs | TIGR00357 | Methionine sulphoxide | 3.40E−75 | 28-154 |
| | | | reductase B | | |
| IPR002579 | Pfam 23.0 | PF01641 | Methionine sulphoxide | 1.10E−75 | 31-153 |
| | | | reductase B | | |
| IPR002579 | ProDom 2005.1 | PD004057 | Methionine sulphoxide | 4.00E−61 | 31-149 |
| | | | reductase B | | |

4.2. Enolase (2-phospho-D-glycerate hydrolase)

[0541] The results of the InterPro scan of the polypeptide sequence as represented by SEQ ID NO: 194 are presented in Table C3.

TABLE C3
InterPro scan results of the polypeptide sequence as represented by SEQ ID NO:
194.

| | Enolase | | | |
|---|---|---|---|---|
| | | | | e-value/acid coordinates |
| | | Accession | | on SEQ ID NO 194 |
| InterPro | Database | number | Accession name | [Start-End]T |
| IPR000941 | PRODOM | PD000902 | Q7XBE4_EEEEE_Q7XBE4; | 5e−163/[154-442]T |
| Family | PRINTS | PR00148 | ENOLASE | 5.2e−52/[38-52]T |
| | | | | 5.2e−52/[113-129]T |
| | | | | 5.2e−52/[170-183]T |
| | | | | 5.2e−52/[328-339]T |
| | | | | 5.2e−52/[351-365]T |
| | | | | 5.2e−52/[380-397]T |
| | PIR | PIRSF001400 | Enolase | 5.5e−272/[2-442]T |
| | PANTHER | PTHR11902 | ENOLASE | 6e−123/[4-221]T |
| | PFAM | PF00113 | Enolase_C | 1.5e−215/[148-443]T |
| | PFAM | PF03952 | Enolase_N | 3.5e−68/[4-140]T |
| | TIGRFAMs | TIGR01060 | eno: phosphopyruvate hydratase | 3.1e−242/[5-443]T |
| | PROSITE | PS00164 | ENOLASE | 8e−5/[351-364]T |

4.3. Zn Transporter of Arabidopsis thaliana (ZAT)

[0542] The results of the InterPro scan of the polypeptide sequence as represented by SEQ ID NO: 248 are presented in Table C4.

TABLE C4
InterPro scan results (major accession numbers) of the polypeptide
sequence as represented by SEQ ID NO: 248.

| | | |
|---|---|---|
| InterPro | IPR002524 | Cation efflux protein |

Biological Process: cation transport (GO: 0006812), Molecular
Function: cation transporter activity (GO: 0008324), Cellular
Component: membrane (GO: 0016020)

| method | AccNumber | shortName | location |
|---|---|---|---|
| PANTHER | PTHR11562 | CATION EFFLUX | 1e−106 [33-204]T |
| | | PROTEIN/ZINC | 1e−106 [251-397]T |
| | | TRANSPORTER | |
| Pfam | PF01545 | Cation_efflux | 6.4e−73 [58-397]T |
| TigrFAMS | TIGR01297 | CDF: cation diffusion | 4.3e−85 [54-398]T |
| | | facilitator family tr | |

### 4.4. 6-Phosphogluconate Dehydrogenase (6-PGDH)

[0543] The protein sequences representing the 6-PGDH are used as query to search the InterPro database (Table C5).

TABLE C5

| Method | Acc Number | Short Name | location |
|---|---|---|---|
| InterPro | IPR006113 | 6-phosphogluconate dehydrogenase, decarboxylating | |
| HMMTigr | TIGR00873 | gnd: 6-phosphogluconate dehydrogenase, decar | [5-473] |
| InterPro | IPR006114 | 6-phosphogluconate dehydrogenase, C-terminal | |
| HMMPfam | PF00393 | 6PGD | [182-472] |
| InterPro | IPR006115 | 6-phosphogluconate dehydrogenase, NAD-binding | |
| HMMPfam | PF03446 | NAD_binding_2 | [3-178] |
| InterPro | IPR006183 | 6-phosphogluconate dehydrogenase | |
| FPrintScan | PR00076 | 6PGDHDRGNASE | [4-27] |
| | | | [69-98] |
| | | | [122-147] |
| | | | [171-199] |
| | | | [253-280] |
| | | | [361-383] |
| InterPro | IPR008927 | 6-phosphogluconate dehydrogenase, C-terminal-like | |
| superfamily | SSF48179 | 6-phosphogluconate dehydrogenase C-terminal | [180-477] |
| | | domain-like | |
| InterPro | IPR012284 | Fibritin/6-phosphogluconate dehydrogenase, C- | |
| | | terminal extension | |
| Gene3D | G3DSA:1.20.5.320 | no description | [440-471] |
| InterPro | IPR013328 | Dehydrogenase, multihelical | |
| Gene3D | G3DSA:1.10.1040.10 | no description | [184-439] |
| InterPro | IPR016040 | NAD(P)-binding | |
| Gene3D | G3DSA:3.40.50.720 | no description | [2-183] |
| superfamily | SSF51735 | NAD(P)-binding Rossmann-fold domains | [3-179] |
| InterPro | NULL | NULL | |
| HMMPanther | PTHR11811 | 6-PHOSPHOGLUCONATE DEHYDROGENASE | [183-479] |
| SignalPHMM | signalp | signal-peptide | [1-19] |

### Example 5

### Topology Prediction of the Polypeptide Sequences Useful in Performing the Methods of the Invention

[0544] TargetP 1.1 predicts the subcellular location of eukaryotic proteins. The location assignment is based on the predicted presence of any of the N-terminal pre-sequences: chloroplast transit peptide (cTP), mitochondrial targeting peptide (mTP) or secretory pathway signal peptide (SP). Scores on which the final prediction is based are not really probabilities, and they do not necessarily add to one. However, the location with the highest score is the most likely according to TargetP, and the relationship between the scores (the reliability class) may be an indication of how certain the prediction is. The reliability class (RC) ranges from 1 to 5, where 1 indicates the strongest prediction. TargetP is maintained at the server of the Technical University of Denmark.

[0545] For the sequences predicted to contain an N-terminal presequence a potential cleavage site can also be predicted.

[0546] A number of parameters were selected, such as organism group (non-plant or plant), cutoff sets (none, predefined set of cutoffs, or user-specified set of cutoffs), and the calculation of prediction of cleavage sites (yes or no).

5.1. Zn Transporter of Arabidopsis thaliana (ZAT)

[0547] The results of TargetP 1.1 analysis of the polypeptide sequence as represented by SEQ ID NO: 248 are presented Table D1. The “plant” organism group was selected, no cutoffs defined, and the predicted length of the transit peptide requested. The subcellular localization of the polypeptide sequence as represented by SEQ ID NO: 3 is predicted to be cytoplasmic.

TABLE D1
TargetP 1.1 analysis of the polypeptide sequence as represented by
SEQ ID NO: 248

| | |
|---|---|
| Length (AA) | 398 |
| Chloroplastic transit peptide | 91% |

[0548] Further features of the polypeptide sequence represented by SEQ ID NO: 248 include:
[0549] Molecular weight: 43827 Da
[0550] Theoretical pl: 6.6
[0551] Membrane protein

[0552] Many other algorithms can be used to perform such analyses, including:
[0553] ChloroP 1.1 hosted on the server of the Technical University of Denmark;
[0554] Protein Prowler Subcellular Localisation Predictor version 1.2 hosted on the server of the Institute for Molecular Bioscience, University of Queensland, Brisbane, Australia;
[0555] PENCE Proteome Analyst PA-GOSUB 2.5 hosted on the server of the University of Alberta, Edmonton, Alberta, Canada;
[0556] TMHMM, hosted on the server of the Technical University of Denmark
[0557] PSORT (URL: psort.org)
[0558] PLOC (Park and Kanehisa, Bioinformatics, 19, 1656-1663, 2003).

### 5.2. 6-Phosphogluconate Dehydrogenase (6-PGDH)

[0559] The protein sequences representing the 6-PGDH are used to query TargetP 1.1. The “plant” organism group is selected, no cutoffs defined, and the predicted length of the transit peptide requested.

[0560] Many other algorithms can be used to perform such analyses, including:
[0561] ChloroP 1.1 hosted on the server of the Technical University of Denmark;
[0562] Protein Prowler Subcellular Localisation Predictor version 1.2 hosted on the server of the Institute for Molecular Bioscience, University of Queensland, Brisbane, Australia;
[0563] PENCE Proteome Analyst PA-GOSUB 2.5 hosted on the server of the University of Alberta, Edmonton, Alberta, Canada;
[0564] TMHMM, hosted on the server of the Technical University of Denmark

### Example 6

### Cloning of the Nucleic Acid Sequence Used in the Methods of the Invention

### 6.1. Methionine Sulfoxide Reductase (Msr)

### SEQ ID NO: 1

[0565] A nucleic acid sequence encoding an MSR polypeptide was amplified by PCR using as template a custom-made Oryza sativa seedlings cDNA library (in pCMV Sport 6.0; Invitrogen, Paisley, UK). PCR was performed using Hifi Taq DNA polymerase in standard conditions, using 200 ng of template in a 50 μl PCR mix. The primers used were (SEQ ID NO: 184; sense): 5′-ggggacaagtttgtacaaaaaagcaggcttaaacaatgagctggctcgggaa-3′ and (SEQ ID NO: 185; reverse, complementary): 5′-ggggaccactttgtacaagaaa gctgggtgttctggttcaaacttgccc-3′, which include the AttB sites for Gateway recombination. The amplified PCR fragment was purified also using standard methods. The first step of the Gateway procedure, the BP reaction, was then performed, during which the PCR fragment recombined in vivo with the pDONR201 plasmid to produce, according to the Gateway terminology, an “entry clone”, pOs_MSR. Plasmid pDONR201 was purchased from Invitrogen, as part of the Gateway® technology.

[0566] The entry clone comprising SEQ ID NO: 1 was then used in an LR reaction with a destination vector used for Oryza sativa transformation. This vector contained as functional elements within the T-DNA borders: a plant selectable marker; a screenable marker expression cassette; and a Gateway cassette intended for LR in vivo recombination with the nucleic acid sequence of interest already cloned in the entry clone. A rice GOS2 promoter (SEQ ID NO: 196) for constitutive specific expression was located upstream of this Gateway cassette.

[0567] After the LR recombination step, the resulting expression vector pGOS2::MSR (FIG. 2) was transformed into Agrobacterium strain LBA4044 according to methods well known in the art.

### SEQ ID NO: 101

[0568] A nucleic acid sequence was amplified by PCR using as template a custom-made Medicago truncatula seedlings cDNA library (in pCMV Sport 6.0; Invitrogen, Paisley, UK). PCR was performed using Hifi Taq DNA polymerase in standard conditions, using 200 ng of template in a 50 μl PCR mix. The primers used were (SEQ ID NO: 186; sense): 5′-ggggaca agtttgtacaaaaaagcaggcttaaacaatgggctcttcagcttcttct-3′ and (SEQ ID NO: 187; reverse, complementary): 5′-ggggaccactttgtacaagaaagctgggttttgatcatc ttacttccttggtt-3′, which include the AttB sites for Gateway recombination. The amplified PCR fragment was purified also using standard methods. The first step of the Gateway procedure, the BP reaction, was then performed, during which the PCR fragment recombined in vivo with the pDONR201 plasmid to produce, according to the Gateway terminology, an “entry clone”, pMt_MSR. Plasmid pDONR201 was purchased from Invitrogen, as part of the Gateway® technology.

[0569] The entry clone comprising SEQ ID NO: 101 was then used in an LR reaction with a destination vector used for Oryza sativa transformation. This vector contained as functional elements within the T-DNA borders: a plant selectable marker; a screenable marker expression cassette; and a Gateway cassette intended for LR in vivo recombination with the nucleic acid sequence of interest already cloned in the entry clone. A rice GOS2 promoter (SEQ ID NO: 188) for constitutive specific expression was located upstream of this Gateway cassette.

[0570] After the LR recombination step, the resulting expression vector pGOS2::MSR (FIG. 2) was transformed into Agrobacterium strain LBA4044 according to methods well known in the art.

### SEQ ID NO: 163

[0571] A nucleic acid sequence was amplified by PCR using as template a custom-made Triticum aestivum seedlings cDNA library (in pCMV Sport 6.0; Invitrogen, Paisley, UK). PCR was performed using Hifi Taq DNA polymerase in standard conditions, using 200 ng of template in a 50 μl PCR mix. The primers used were (SEQ ID NO: 189; sense): 5′-ggggacaagt ttgtacaaaaaagcaggcttaaacaatgggcgccgcgccgt-3′ and (SEQ ID NO: 190; reverse, complementary): 5′-ggggaccactttgtacaagaaagctgggtactactggggctt aaacttcagagac-3′, which include the AttB sites for Gateway recombination. The amplified PCR fragment was purified also using standard methods. The first step of the Gateway procedure, the BP reaction, was then performed, during which the PCR fragment recombined in vivo with the pDONR201 plasmid to produce, according to the Gateway terminology, an “entry clone”, pTa_MSR. Plasmid pDONR201 was purchased from Invitrogen, as part of the Gateway® technology.

[0572] The entry clone comprising at least part of SEQ ID NO: 171 was then used in an LR reaction with a destination vector used for Oryza sativa transformation. This vector contained as functional elements within the T-DNA borders: a plant selectable marker; a screenable marker expression cassette; and a Gateway cassette intended for LR in vivo recombination with the nucleic acid sequence of interest already cloned in the entry clone. A rice GOS2 promoter (SEQ ID NO: 188) for constitutive specific expression was located upstream of this Gateway cassette.

[0573] After the LR recombination step, the resulting expression vector pGOS2::MSR (FIG. 2) was transformed into Agrobacterium strain LBA4044 according to methods well known in the art.

### SEQ ID NO: 23

[0574] A nucleic acid sequence encoding an MSR polypeptide was amplified by PCR using as template a custom-made Arabidopsis thaliana seedlings cDNA library (in pCMV Sport 6.0; Invitrogen, Paisley, UK). PCR was performed using Hifi Taq DNA polymerase in standard conditions, using 200 ng of template in a 50 μl PCR mix. The primers used were (SEQ ID NO: 191; sense): 5′-ggggacaagtttgtacaaaaaagcaggcttaaacaatgcaggtcctcgtcgt c-3′ and (SEQ ID NO: 192; reverse, complementary): 5′-ggggaccactttgtacaagaaa gctgggtgtgcttgagggaagactgact-3′, which include the AttB sites for Gateway recombination. The amplified PCR fragment was purified also using standard methods. The first step of the Gateway procedure, the BP reaction, was then performed, during which the PCR fragment recombined in vivo with the pDONR201 plasmid to produce, according to the Gateway terminology, an “entry clone”, pAt_MSR. Plasmid pDONR201 was purchased from Invitrogen, as part of the Gateway® technology.

[0575] The entry clone comprising SEQ ID NO: 1 was then used in an LR reaction with a destination vector used for Oryza sativa transformation. This vector contained as functional elements within the T-DNA borders: a plant selectable marker; a screenable marker expression cassette; and a Gateway cassette intended for LR in vivo recombination with the nucleic acid sequence of interest already cloned in the entry clone. A rice GOS2 promoter (SEQ ID NO: 188) for constitutive specific expression was located upstream of this Gateway cassette.

[0576] After the LR recombination step, the resulting expression vector essentially as represented by pGOS2::MSR (FIG. 2) was transformed into Agrobacterium strain LBA4044 according to methods well known in the art.

6.2. Enolase (2-phospho-D-glycerate hydrolase)

[0577] The nucleic acid sequence used in the methods of the invention was amplified by PCR using as template a custom-made Oryza sativa seedlings cDNA library (in pCMV Sport 6.0; Invitrogen, Paisley, UK). PCR was performed using Hifi Taq DNA polymerase in standard conditions, using 200 ng of template in a 50 μl PCR mix. The primers used were: 5′-ggggaca agtttgtacaaaaaagcaggcttaaacaatggcggcgacgat-3′ (SEQ ID NO: 243; sense) and (SEQ ID NO: 244; reverse, complementary): 5′-ggggaccactttgtacaagaaagctgg gttttagtagggctccacgg-3′, which include the AttB sites for Gateway recombination. The amplified PCR fragment was purified also using standard methods. The first step of the Gateway procedure, the BP reaction, was then performed, during which the PCR fragment recombined in vivo with the pDONR201 plasmid to produce, according to the Gateway terminology, an “entry clone”, pEnolase\™. Plasmid pDONR201 was purchased from Invitrogen, as part of the Gateway® technology.

[0578] The entry clone comprising SEQ ID NO: 193 was then used in an LR reaction with a destination vector used for Oryza sativa transformation. This vector contained as functional elements within the T-DNA borders: a plant selectable marker; a screenable marker expression cassette; and a Gateway cassette intended for LR in vivo recombination with the nucleic acid sequence of interest already cloned in the entry clone. A rice GOS2 promoter (SEQ ID NO: 241) for constitutive specific expression was located upstream of this Gateway cassette.

[0579] After the LR recombination step, the resulting expression vector pGOS2::ENOLASE (FIG. 5) was transformed into Agrobacterium strain LBA4044 according to methods well known in the art.

6.3. Zn Transporter of Arabidopsis thaliana (ZAT)

[0580] The nucleic acid sequence used in the methods of the invention was amplified by PCR using an Arabidopsis thaliana seedling cDNA library (in pCMV Sport 6.0; Invitrogen, Paisley, UK). PCR was performed using Hifi Taq DNA polymerase under standard conditions, using 200 ng of template in a 50 μl PCR mix. The primers used were (SEQ ID NO: 278; sense, start codon in bold): 5′-GGGGACAAGITTGTACAAAAAAGCAGGCTTAAACAATGGAGTCTTCAAGTCCCC AC-3′ and (SEQ ID NO: 279; reverse, complementary): 5′-GGGGACCACTTTGTACAAGAA AGCTGGGTTAGCTTTTAGCGCTCGATTTG-3′, which include the AttB sites for Gateway recombination. The amplified PCR fragment was purified, also using standard methods. The first step of the Gateway procedure, the BP reaction, was then performed, during which the PCR fragment recombined in vivo with the pDONR201 plasmid to produce, according to the Gateway terminology, an “entry clone”, pZAT. Plasmid pDONR201 was purchased from Invitrogen, as part of the Gateway® technology.

[0581] The entry clone comprising SEQ ID NO: 246 was then used in an LR reaction with a destination vector used for Oryza sativa transformation. This vector contained as functional elements within the T-DNA borders: a plant selectable marker; a screenable marker expression cassette; and a Gateway cassette intended for LR in vivo recombination with the nucleic acid sequence of interest already cloned in the entry clone. A rice GOS2 promoter (SEQ ID NO: 32) for constitutive expression was located upstream of this Gateway cassette.

[0582] After the LR recombination step, the resulting expression vector pGOS2::ZAT (FIG. 8) was transformed into Agrobacterium strain LBA4044 according to methods well known in the art.

### 6.4. 6-Phosphogluconate Dehydrogenase (6-PGDH)

### Cloning of SEQ ID NO: 280:

[0583] The nucleic acid sequence SEQ ID NO: 280 used in the methods of the invention was amplified by PCR using as template a custom-made Oryza sativa seedlings cDNA library (in pCMV Sport 6.0; Invitrogen, Paisley, UK). PCR was performed using Hifi Taq DNA polymerase in standard conditions, using 200 ng of template in a 50 μl PCR mix. The primers used were prm09718 (SEQ ID NO: 283; sense, start codon in bold): 5′-gggg acaagtttgtacaaaaaagcaggcttaaacaatggctgtcactagaattggt-3′ and prm09719 (SEQ ID NO: 284; reverse, complementary): 5′-ggggaccactttgtacaag aaagctgggtattaccgaaaatttgaagcat-3′, which include the AttB sites for Gateway recombination. The amplified PCR fragment was purified also using standard methods. The first step of the Gateway procedure, the BP reaction, was then performed, during which the PCR fragment recombines in vivo with the pDONR201 plasmid to produce, according to the Gateway terminology, an “entry clone”. Plasmid pDONR201 was purchased from Invitrogen, as part of the Gateway® technology.

[0584] The entry clone comprising SEQ ID NO: 280 was then used in an LR reaction with a destination vector used for Oryza sativa transformation. This vector contained as functional elements within the T-DNA borders: a plant selectable marker; a screenable marker expression cassette; and a Gateway cassette intended for LR in vivo recombination with the nucleic acid sequence of interest already cloned in the entry clone. A rice GOS2 promoter (SEQ ID NO: 6) for seed specific expression was located upstream of this Gateway cassette.

[0585] After the LR recombination step, the resulting expression vector pGOS2::6-PGDH (FIG. 9) was transformed into Agrobacterium strain LBA4044 according to methods well known in the art.

### Example 7

### Plant Transformation

### Rice Transformation

[0586] The Agrobacterium containing the expression vector was used to transform Oryza sativa plants. Mature dry seeds of the rice japonica cultivar Nipponbare were dehusked. Sterilization was carried out by incubating for one minute in 70% ethanol, followed by 30 minutes in 0.2% HgCl₂, followed by a 6 times 15 minutes wash with sterile distilled water. The sterile seeds were then germinated on a medium containing 2,4-D (callus induction medium). After incubation in the dark for four weeks, embryogenic, scutellum-derived calli were excised and propagated on the same medium. After two weeks, the calli were multiplied or propagated by subculture on the same medium for another 2 weeks. Embryogenic callus pieces were sub-cultured on fresh medium 3 days before co-cultivation (to boost cell division activity).

[0587] Agrobacterium strain LBA4404 containing the expression vector was used for co-cultivation. Agrobacterium was inoculated on AB medium with the appropriate antibiotics and cultured for 3 days at 28° C. The bacteria were then collected and suspended in liquid co-cultivation medium to a density (OD₆₀₀) of about 1. The suspension was then transferred to a Petri dish and the calli immersed in the suspension for 15 minutes. The callus tissues were then blotted dry on a filter paper and transferred to solidified, co-cultivation medium and incubated for 3 days in the dark at 25° C. Co-cultivated calli were grown on 2,4-D-containing medium for 4 weeks in the dark at 28° C. in the presence of a selection agent. During this period, rapidly growing resistant callus islands developed. After transfer of this material to a regeneration medium and incubation in the light, the embryogenic potential was released and shoots developed in the next four to five weeks. Shoots were excised from the calli and incubated for 2 to 3 weeks on an auxin-containing medium from which they were transferred to soil. Hardened shoots were grown under high humidity and short days in a greenhouse.

[0588] Approximately 35 independent T0 rice transformants were generated for one construct. The primary transformants were transferred from a tissue culture chamber to a greenhouse. After a quantitative PCR analysis to verify copy number of the T-DNA insert, only single copy transgenic plants that exhibit tolerance to the selection agent were kept for harvest of T1 seed. Seeds were then harvested three to five months after transplanting. The method yielded single locus transformants at a rate of over 50% (Aldemita and Hodges 1996, Chan et al. 1993, Hiei et al. 1994).

### Corn Transformation

[0589] Transformation of maize (Zea mays) is performed with a modification of the method described by Ishida et al. (1996) Nature Biotech 14(6): 745-50. Transformation is genotype-dependent in corn and only specific genotypes are amenable to transformation and regeneration. The inbred line A188 (University of Minnesota) or hybrids with A188 as a parent are good sources of donor material for transformation, but other genotypes can be used successfully as well. Ears are harvested from corn plant approximately 11 days after pollination (DAP) when the length of the immature embryo is about 1 to 1.2 mm. Immature embryos are cocultivated with Agrobacterium tumefaciens containing the expression vector, and transgenic plants are recovered through organogenesis. Excised embryos are grown on callus induction medium, then maize regeneration medium, containing the selection agent (for example imidazolinone but various selection markers can be used). The Petri plates are incubated in the light at 25° C. for 2-3 weeks, or until shoots develop. The green shoots are transferred from each embryo to maize rooting medium and incubated at 25° C. for 2-3 weeks, until roots develop. The rooted shoots are transplanted to soil in the greenhouse. T1 seeds are produced from plants that exhibit tolerance to the selection agent and that contain a single copy of the T-DNA insert.

### Wheat Transformation

[0590] Transformation of wheat is performed with the method described by Ishida et al. (1996) Nature Biotech 14(6): 745-50. The cultivar Bobwhite (available from CIMMYT, Mexico) is commonly used in transformation. Immature embryos are co-cultivated with Agrobacterium tumefaciens containing the expression vector, and transgenic plants are recovered through organogenesis. After incubation with Agrobacterium, the embryos are grown in vitro on callus induction medium, then regeneration medium, containing the selection agent (for example imidazolinone but various selection markers can be used). The Petri plates are incubated in the light at 25° C. for 2-3 weeks, or until shoots develop. The green shoots are transferred from each embryo to rooting medium and incubated at 25° C. for 2-3 weeks, until roots develop. The rooted shoots are transplanted to soil in the greenhouse. T1 seeds are produced from plants that exhibit tolerance to the selection agent and that contain a single copy of the T-DNA insert.

### Soybean Transformation

[0591] Soybean is transformed according to a modification of the method described in the Texas A&M U.S. Pat. No. 5,164,310. Several commercial soybean varieties are amenable to transformation by this method. The cultivar Jack (available from the Illinois Seed foundation) is commonly used for transformation. Soybean seeds are sterilised for in vitro sowing. The hypocotyl, the radicle and one cotyledon are excised from seven-day old young seedlings. The epicotyl and the remaining cotyledon are further grown to develop axillary nodes. These axillary nodes are excised and incubated with Agrobacterium tumefaciens containing the expression vector. After the cocultivation treatment, the explants are washed and transferred to selection media. Regenerated shoots are excised and placed on a shoot elongation medium. Shoots no longer than 1 cm are placed on rooting medium until roots develop. The rooted shoots are transplanted to soil in the greenhouse. T1 seeds are produced from plants that exhibit tolerance to the selection agent and that contain a single copy of the T-DNA insert.

### Rapeseed/Canola Transformation

[0592] Cotyledonary petioles and hypocotyls of 5-6 day old young seedling are used as explants for tissue culture and transformed according to Babic et al. (1998, Plant Cell Rep 17: 183-188). The commercial cultivar Westar (Agriculture Canada) is the standard variety used for transformation, but other varieties can also be used. Canola seeds are surface-sterilized for in vitro sowing. The cotyledon petiole explants with the cotyledon attached are excised from the in vitro seedlings, and inoculated with Agrobacterium (containing the expression vector) by dipping the cut end of the petiole explant into the bacterial suspension. The explants are then cultured for 2 days on MSBAP-3 medium containing 3 mg/l BAP, 3% sucrose, 0.7% Phytagar at 23° C., 16 hr light. After two days of co-cultivation with Agrobacterium, the petiole explants are transferred to MSBAP-3 medium containing 3 mg/l BAP, cefotaxime, carbenicillin, or timentin (300 mg/l) for 7 days, and then cultured on MSBAP-3 medium with cefotaxime, carbenicillin, or timentin and selection agent until shoot regeneration. When the shoots are 5-10 mm in length, they are cut and transferred to shoot elongation medium (MSBAP-0.5, containing 0.5 mg/l BAP). Shoots of about 2 cm in length are transferred to the rooting medium (MSO) for root induction. The rooted shoots are transplanted to soil in the greenhouse. T1 seeds are produced from plants that exhibit tolerance to the selection agent and that contain a single copy of the T-DNA insert.

### Alfalfa Transformation

[0593] A regenerating clone of alfalfa (Medicago sativa) is transformed using the method of (McKersie et al., 1999 Plant Physiol 119: 839-847). Regeneration and transformation of alfalfa is genotype dependent and therefore a regenerating plant is required. Methods to obtain regenerating plants have been described. For example, these can be selected from the cultivar Rangelander (Agriculture Canada) or any other commercial alfalfa variety as described by Brown DCW and A Atanassov (1985. Plant Cell Tissue Organ Culture 4: 111-112). Alternatively, the RA3 variety (University of Wisconsin) has been selected for use in tissue culture (Walker et al., 1978 Am J Bot 65:654-659). Petiole explants are cocultivated with an overnight culture of Agrobacterium tumefaciens C58C1 pMP90 (McKersie et al., 1999 Plant Physiol 119: 839-847) or LBA4404 containing the expression vector. The explants are cocultivated for 3 d in the dark on SH induction medium containing 288 mg/L Pro, 53 mg/L thioproline, 4.35 g/L K2SO4, and 100 μm acetosyringinone. The explants are washed in half-strength Murashige-Skoog medium (Murashige and Skoog, 1962) and plated on the same SH induction medium without acetosyringinone but with a suitable selection agent and suitable antibiotic to inhibit Agrobacterium growth. After several weeks, somatic embryos are transferred to BOi2Y development medium containing no growth regulators, no antibiotics, and 50 g/L sucrose. Somatic embryos are subsequently germinated on half-strength Murashige-Skoog medium. Rooted seedlings were transplanted into pots and grown in a greenhouse. T1 seeds are produced from plants that exhibit tolerance to the selection agent and that contain a single copy of the T-DNA insert.

### Cotton Transformation

[0594] Cotton is transformed using Agrobacterium tumefaciens according to the method described in U.S. Pat. No. 5,159,135. Cotton seeds are surface sterilised in 3% sodium hypochlorite solution during 20 minutes and washed in distilled water with 500 μg/ml cefotaxime. The seeds are then transferred to SH-medium with 50 μg/ml benomyl for germination. Hypocotyls of 4 to 6 days old seedlings are removed, cut into 0.5 cm pieces and are placed on 0.8% agar. An Agrobacterium suspension (approx. 108 cells per ml, diluted from an overnight culture transformed with the gene of interest and suitable selection markers) is used for inoculation of the hypocotyl explants. After 3 days at room temperature and lighting, the tissues are transferred to a solid medium (1.6 g/l Gelrite) with Murashige and Skoog salts with B5 vitamins (Gamborg et al., Exp. Cell Res. 50:151-158 (1968)), 0.1 mg/l 2,4-D, 0.1 mg/l 6-furfurylaminopurine and 750 μg/ml MgCL2, and with 50 to 100 μg/ml cefotaxime and 400-500 μg/ml carbenicillin to kill residual bacteria. Individual cell lines are isolated after two to three months (with subcultures every four to six weeks) and are further cultivated on selective medium for tissue amplification (30° C., 16 hr photoperiod). Transformed tissues are subsequently further cultivated on non-selective medium during 2 to 3 months to give rise to somatic embryos. Healthy looking embryos of at least 4 mm length are transferred to tubes with SH medium in fine vermiculite, supplemented with 0.1 mg/l indole acetic acid, 6 furfurylaminopurine and gibberellic acid. The embryos are cultivated at 30° C. with a photoperiod of 16 hrs, and plantlets at the 2 to 3 leaf stage are transferred to pots with vermiculite and nutrients. The plants are hardened and subsequently moved to the greenhouse for further cultivation.

### Example 8

### Phenotypic Evaluation Procedure

### 8.1 Evaluation Setup

[0595] Approximately 35 independent T0 rice transformants were generated. The primary transformants were transferred from a tissue culture chamber to a greenhouse for growing and harvest of T1 seed. Six events, of which the T1 progeny segregated 3:1 for presence/absence of the transgene, were retained. For each of these events, approximately 10 T1 seedlings containing the transgene (hetero- and homo-zygotes) and approximately 10 T1 seedlings lacking the transgene (nullizygotes) were selected by monitoring visual marker expression. The transgenic plants and the corresponding nullizygotes were grown side-by-side at random positions. Greenhouse conditions were of shorts days (12 hours light), 28° C. in the light and 22° C. in the dark, and a relative humidity of 70%. Plants grown under non-stress conditions were watered at regular intervals to ensure that water and nutrients were not limiting and to satisfy plant needs to complete growth and development.

[0596] Four T1 events were further evaluated in the T2 generation following the same evaluation procedure as for the T1 generation but with more individuals per event. From the stage of sowing until the stage of maturity the plants were passed several times through a digital imaging cabinet. At each time point digital images (2048×1536 pixels, 16 million colours) were taken of each plant from at least 6 different angles.

### Drought Screen

[0597] Plants from T2 seeds are grown in potting soil under normal conditions until they approach the heading stage. They are then transferred to a “dry” section where irrigation is withheld. Humidity probes are inserted in randomly chosen pots to monitor the soil water content (SWC). When SWC goes below certain thresholds, the plants are automatically re-watered continuously until a normal level is reached again. The plants are then re-transferred again to normal conditions. The rest of the cultivation (plant maturation, seed harvest) is the same as for plants not grown under abiotic stress conditions. Growth and yield parameters are recorded as detailed for growth under normal conditions.

### Nitrogen Use Efficiency Screen

[0598] Rice plants from T2 seeds were grown in potting soil under normal conditions except for the nutrient solution. The pots were watered from transplantation to maturation with a specific nutrient solution containing reduced N nitrogen (N) content, usually between 7 to 8 times less. The rest of the cultivation (plant maturation, seed harvest) is the same as for plants not grown under abiotic stress. Growth and yield parameters were recorded as detailed for growth under normal conditions.

### Salt Stress Screen

[0599] Plants are grown on a substrate made of coco fibers and argex (3 to 1 ratio). A normal nutrient solution is used during the first two weeks after transplanting the plantlets in the greenhouse. After the first two weeks, 25 mM of salt (NaCl) is added to the nutrient solution, until the plants are harvested. Seed-related parameters are then measured.

### 8.2 Statistical Analysis: F Test

[0600] A two factor ANOVA (analysis of variants) was used as a statistical model for the overall evaluation of plant phenotypic characteristics. An F test was carried out on all the parameters measured of all the plants of all the events transformed with the gene of the present invention. The F test was carried out to check for an effect of the gene over all the transformation events and to verify for an overall effect of the gene, also known as a global gene effect. The threshold for significance for a true global gene effect was set at a 5% probability level for the F test. A significant F test value points to a gene effect, meaning that it is not only the mere presence or position of the gene that is causing the differences in phenotype.

[0601] Because two experiments with overlapping events were carried out, a combined analysis was performed. This is useful to check consistency of the effects over the two experiments, and if this is the case, to accumulate evidence from both experiments in order to increase confidence in the conclusion. The method used was a mixed-model approach that takes into account the multilevel structure of the data (i.e. experiment-event-segregants). P values were obtained by comparing likelihood ratio test to chi square distributions.

### 8.3 Parameters Measured

### Biomass-Related Parameter Measurement

[0602] From the stage of sowing until the stage of maturity the plants were passed several times through a digital imaging cabinet. At each time point digital images (2048×1536 pixels, 16 million colours) were taken of each plant from at least 6 different angles.

[0603] The plant aboveground area (or leafy biomass) was determined by counting the total number of pixels on the digital images from aboveground plant parts discriminated from the background. This value was averaged for the pictures taken on the same time point from the different angles and was converted to a physical surface value expressed in square mm by calibration. Experiments show that the aboveground plant area measured this way correlates with the biomass of plant parts above ground. The above ground area is the area measured at the time point at which the plant had reached its maximal leafy biomass. The early vigour is the plant (seedling) aboveground area three weeks post-germination. Increase in root biomass is expressed as an increase in total root biomass (measured as maximum biomass of roots observed during the lifespan of a plant); or as an increase in the root/shoot index (measured as the ratio between root mass and shoot mass in the period of active growth of root and shoot).

[0604] Early vigour was determined by counting the total number of pixels from aboveground plant parts discriminated from the background. This value was averaged for the pictures taken on the same time point from different angles and was converted to a physical surface value expressed in square mm by calibration. The results described below are for plants three weeks post-germination.

### Seed-Related Parameter Measurements

[0605] The mature primary panicles were harvested, counted, bagged, barcode-labelled and then dried for three days in an oven at 37° C. The panicles were then threshed and all the seeds were collected and counted. The filled husks were separated from the empty ones using an air-blowing device. The empty husks were discarded and the remaining fraction was counted again. The filled husks were weighed on an analytical balance. The number of filled seeds was determined by counting the number of filled husks that remained after the separation step. The total seed yield was measured by weighing all filled husks harvested from a plant. Total seed number per plant was measured by counting the number of husks harvested from a plant. Thousand Kernel Weight (TKW) is extrapolated from the number of filled seeds counted and their total weight. The Harvest Index (HI) in the present invention is defined as the ratio between the total seed yield and the above ground area (mm²), multiplied by a factor 10⁶. The total number of flowers per panicle as defined in the present invention is the ratio between the total number of seeds and the number of mature primary panicles. The seed fill rate as defined in the present invention is the proportion (expressed as a %) of the number of filled seeds over the total number of seeds (or florets).

### Examples 9

### Results of the Phenotypic Evaluation of the Transgenic Plants

### 9.1. Methionine Sulfoxide Reductase (Msr)

### PGOS2:: SEQ ID NO: 1—Non Stress Conditions

[0606] The results of the evaluation of transgenic rice plants in the T2 generation and expressing an MSR nucleic acid comprising the longest open reading frame of SEQ ID NO: 1 under the control of the constitutive promoter pGOS2 in non-stress conditions are presented below. The performance of the plants in respect of different yield-related-traits is deduced from parameters measured as described in section 7.3.

[0607] An increase of at least 5% was observed for area max (aboveground biomass), emergence vigour (early vigour or EmerVigor), total seed yield (totalwgseeds), flowerperpan (number of flowers per panicle), RootThickMax (maximum biomass of the portion of roots comprising thick roots), number of filled seeds (nrfilledseed), total number of seeds (Total nr of seeds) and harvest index per plant (Table E1).

TABLE E1
Results evaluation of transgenic plants growing under non-stress
conditions.

| | % Increase in transgenic |
|---|---|
| Yield Related Trait | compared to control plant. |
| Area Max | 5.2 |
| flowerperpan | 8.9 |
| RootThickMax | 7.5 |
| EmerVigor | 16 |
| Harvest index | 13 |
| totalwgseeds | 19 |
| Total nr of seeds | 13 |
| nrfilledseed | 20 |

### PGOS2:: SEQ ID NO: 101—Non Stress Conditions

[0608] The results of the evaluation of transgenic rice plants in the T2 generation and expressing an MSR nucleic acid comprising the longest open reading frame of SEQ ID NO: 101 under the control of the constitutive promoter pGOS2 in non-stress conditions are presented below. The performance of the plants in respect of different yield-related-traits is deduced from parameters measured essentially as described in section 7.3.

[0609] An increase of at least 5% was observed for the total seed yield (totalwgseeds), number of filled seeds (nrfilledseed), seed filling rate (fillrate) and harvest index per plant (Table E2).

TABLE E2
Results evaluation of transgenic plants growing under non-stress
conditions.

| | % Increase in transgenic |
|---|---|
| Parameter | compared to control plant |
| totalwgseeds | 17.1 |
| nrfilledseed | 13.5 |
| fillrate | 14.0 |
| harvestindex | 12.3 |

### PGOS2:: SEQ ID NO: 171—Non Stress Conditions

[0610] The results of the evaluation of transgenic rice plants in the T1 generation and expressing an MSR nucleic acid comprising the longest open reading frame of SEQ ID NO: 171 under the control of the constitutive promoter pGOS2 in non-stress conditions are presented below. The performance of the plants in respect of different yield-related-traits is deduced from parameters measured essentially as described in section 7.3.

[0611] An increase of at least 5% was observed for the seed filling rate (fillrate) and harvest index per plant (Table E3).

TABLE E3
Results evaluation of transgenic plants growing under non-stress
conditions.

| | % Increase in transgenic |
|---|---|
| Parameter | compared to control plant |
| fillrate | 10.1 |

[0612] PGOS2:: SEQ ID NO: 171—Nitrogen Use Deficiency Conditions

[0613] The results of the evaluation of transgenic rice plants in the T1 generation and expressing an MSR nucleic acid comprising the longest open reading frame of SEQ ID NO: 23 under the control of the constitutive promoter pGOS2 in nitrogen use deficiency conditions are presented below. The performance of the plants in respect of different yield-related-traits is deduced from parameters measured essentially as described in section 7.3.

[0614] An increase of at least 5% was observed in the green biomass of the transgenic plants compared to the control plants (nullyzygous plants).

9.2. Enolase (2-phospho-D-glycerate hydrolase)

[0615] The results of the evaluation of transgenic rice plants expressing an Enolase nucleic acid comprising the longest open reading frame in SEQ ID NO: 193 under the control of the rice GOS2 promoter for constitutive expression and cultivated under non-stress conditions are presented below. An increase of more than 5% was observed for harvest index (harvestindex), seed filling rate (fillrate), total seed yield (totalwgseeds or total weight of seeds), and number of filled seeds (nrfilledseed). See Table E4.

TABLE E4

| | % Difference in transgenic |
|---|---|
| Yield-related trait | versus control plants |
| totalwgseeds | 18.45 |
| nrfilledseed | 16.3 |
| fillrate | 17.0 |
| harvestindex | 21.3 |

[0616] The results of the evaluation of transgenic rice plants expressing an Enolase nucleic acid as represented by SEQ ID NO: 193 under the control of PRO0151 promoter and cultivated under non-stress conditions are presented below. An increase of more than 5% was observed for aboveground biomass (AreaMax), emergence vigour (EmerVigor or early vigour), total seed yield (totalwgseeds), and number of filled seeds (nrfilledseed). See Table E5.

TABLE E5

| | % Difference in transgenic |
|---|---|
| Yield-related trait | versus control plants |
| AreaMax | 11.5 |
| EmerVigor | 25.8 |
| totalwgseeds | 16.55 |
| nrfilledseed | 15.1 |

[0617] The results of the evaluation of transgenic rice plants expressing an Enolase nucleic acid as represented by SEQ ID NO: 193 under the control of the rice GOS2 promoter for constitutive expression and cultivated under the conditions of the drought screen of Example 7 are presented below. An increase of more than 5% was observed for the number of filled seeds (nrfilledseed), the seed filling rate (fillrate) and the number of primary panicles (firstpan or first panicles). See Table E6.

TABLE E6

| | % Difference in transgenic |
|---|---|
| Yield-related trait | versus control plants |
| nrfilledseed | 16.7 |
| fillrate | 20.4 |
| firstpan | 15.96 |

[0618] The results of the evaluation of transgenic rice plants expressing an Enolase nucleic acid as represented by SEQ ID NO: 193 under the control of PRO0151 promoter and cultivated under non-stress conditions are presented below. An increase of more than 5% was observed for the total seed yield (totalwgseeds), and number of filled seeds (nrfilledseed), the seed filling rate (fillrate) and the harvest index (harvestindex).

TABLE E7

| | % Difference in transgenic |
|---|---|
| Yield-related trait | versus control plants |
| totalwgseeds | 23.18 |
| nrfilledseed | 22.8 |
| fillrate | 37.6 |
| harvestindex | 32.8 |

9.3. Zn Transporter of Arabidopsis thaliana (ZAT)

[0619] The results of the evaluation of transgenic rice plants expressing a ZAT-like zinc transporter-encoding nucleic acid under non-stress conditions are presented below. An increase of at least 5% (p≦0.05) was observed for the following parameters:

TABLE E8

| Parameter | Overall |
|---|---|
| AreaMax | 24.4 |
| EmerVigor | 33.9 |
| RootMax | 18.3 |
| totalwgseeds | 9.0 |
| nrfilledseed | 8.5 |
| flowerperpan | 6.7 |
| HeightMax | 17.9 |
| RootThickMax | 19.5 |
| RootThinMax | 18.3 |

### 9.4. 6-Phosphogluconate Dehydrogenase (6-PGDH)

[0620] The transgenic rice plants expressing the 6-PGDH nucleic acid represented by SEQ ID NO: 1 under control of the GOS2 promoter showed an increase of more than 5% for aboveground biomass (AreaMax), total weight of seeds (totalwgseeds), number of filled seeds (nrfilledseed), seed filling rate (fillrate) and total number of seeds (nrtotalseed) when grown under non-stress conditions (Table E9).

TABLE E9

| | % increase in transgenic plant |
|---|---|
| Parameter | compared to control plant |
| AreaMax | 9.1 |
| EmerVigor | 23.5 |
| totalwgseeds | 20.4 |
| nrfilledseed | 18.6 |
| fillrate | 3.8 |
| nrtotalseed | 13.4 |

1. A method for enhancing yield-related traits in plants relative to control plants, comprising modulating expression in a plant of a nucleic acid encoding a methionine sulfoxide reductase (MSR) polypeptide, wherein said MSR polypeptide has at least 25% or more amino acid sequence identity to any of the polypeptide sequences given in Table A1 herein.

2. The method of claim 1, wherein said MSR polypeptide comprises at least one conserved protein motif having at least 50% sequence identity to any one of:
(i) Motif 1 as represented by SEQ ID NO: 173: (Q)(Y)(R)(S);
(ii) Motif 2 as represented by SEQ ID NO: 174: (Y/H/E/D/G)(H/S)(Q/R)(Q/K/R)(Y/F)(L/C/E);
(iii) Motif 3 as represented by SEQ ID NO: 175: (I/V)(V/M/I/A/R/F/T)(T/V/R)(E/D/T)(I/V/I/Q)(L/K/A/V/I)(P/G/T/K)(A/S/P/T/Q);
(iv) Motif 4 as represented by SEQ ID NO: 176: (A/F/T/-)(Q/v/e/s/c/t/-)(F/I/A/-) (G/A/-)(A/L/S/T/-)(G/-)(C/S/-)(F/-)(W/-)(G/R/S/-)(V/S/G/-)(E/-)(L/-)(A/M/G/V/T/-) (F/C/A/Y/-)(Q/W/R/G/-)(R/C/E/-)(V/I/L/S/A/-)(P/H/R/N/S/-)(G/-)(V/L/-)(T/V/I/Y/R/A/-) (K/R/E/S/A/Y/Q/V/-)(T/A/-)(E/S/R/A/-)(V/A/-)(G/-)(Y/-)(T/S/A/V/I/-)(Q/G/A/H/-)(G/-) (N/S/L/H/K/A/D/Q/-)(L/K/S/T/I/V/F/R/M/-)(H/T/A/S/Q/K/E/P/D/-)(N/D/H/R/G/E/M/-) (P/-)(T/S/L/N/D/-)(Y/-)(E/R/K/Y/G/Q/-)(D/A/L/-)(V/E/D/A/I/-)(C/Y/-)(T/S/R/H/G/-) (G/N/S/-)(A/L/V/Q/R/K/T/D/M/-)(T/G/A/-)(Y/D/G/N/S/K/-)(H/-) (S/A/T/V/M)(E/Q)(V/S/F/A/G/C)(V/L/D)(R/Q/E/K/Y)(V/I/L/M)(Q/H/E/T/V/I)(Y/F) (D/N)(P/V/L)(K/R/S/Q/A/N)(A/V/L/I/M/Q/E/D/N)(C/I/V/G)(K/P/K/T/G/Q/H)(Y/F) (D/R/S/K/T/E/Q)(D/Q/K/N/T/V/S)(L/I)(L/V)(D/E/S/A/K)(V/F/I/L/M/A/T)(F/H/L)(W/Y) (A/S/Q/K/T/D/N)(R/K/S/M/N)(H)(D/N)(P/S)(T/R)(T/Q/E/A)(L/P/V/I/G/K/F) (N/F/H/M/D)(R/G)(Q)(G/V)(N/P/G/A/E)(D/L)(V/Q/R/L/S)(G)(T/N/A/S/P)(Q)(Y)(R)(S) (G/V/A/C/I)(I/V/L)(Y/F)(Y/T/F/C)(Y/N/H/Q/T/S);
(v) Motif 5 as represented by SEQ ID NO: 177: (G)(W)(P);
(vi) Motif 6 as represented by SEQ ID NO: 178: (L/V)(Y/F/L)(K/D/E/Q/S/R)(S/T/-) (T/S/A/I/L/K/D/-)(T/A/-)(K/-)(F/-)(D/N/-) (S/A/R)(G/P);
(vii) Motif 7 as represented by SEQ ID NO: 179: (G/D/E/N/-)(G/A/S/I/-)(H/F/-)(L/F/-) (G/F/C/-)(H/F)(V/I/S)(F/T/H/L/V)(K/D/P/M/L/I/R);
(viii) Motif 8 as represented by SEQ ID NO: 180: (K/R/L/T/W/L/F/I/-) (S/T/R/Q/P/K/G/-)(E/D/N/A/T/K/-)(E/A/Q/A/G/R/-)(E/D/R/-)((W/L/Q/-) (R/K/A/V/E/Q/-)(A/V/K/T/Q/R/-)(V/I/Q/R/K/G/-)(L/A/-)(S/T/E/N/-) (P/D/S/Q/A/N/E/K/-)(E/D/Q/A/-)(Q/E/A)(F/Y/R/-)(R/Y/H/K/T/Q/-)(I/V/-)(L/T/A/-) (R/L/-)(Q/K/L/D/R/E/H/-)(K/A/E/H/-)(G/M/S/A)(T/I/S)(E/D/R)(R/A/K/N/Y/T/P/I/F/L) (P/A/K/Q/R/A)(G/F/N)(T/S/K/C)(G/S/E)(E/P/V/R)(Y/F/L)(N/D/W/V/T/L/E)(K/N/Q/D) (F/T/N/V/L/K/E/S)(F/W/Y/K/H/D/S)(T/V/A/G/E/D/K/R)(E/P/A/D/K/Q/V)(G)(I/V/A/T) (Y/F);
(ix) Motif 9 as represented by SEQ ID NO: 181: (C)(A/V/I/R)(G/C/L)(C)(G/A/D/N/K/Q/E)(T/S/A/L/N)(P/A/D/K)(L/V)(Y/F/L) (K/E/D/Q/S/R)(S/-)(T/S/K/D/A/I/L);
(x) Motif 10 as represented by SEQ ID NO: 182: (A/S)(F/Y)(F/Y/W/D)(E/Q/D/R/A)(G/P/T/A)(I/V/L/F)(G/P/A/D)(G/A/P/N/D/K/E) (A/N/T)(I/V/H)(N/K/T/G/V/I/A)(R/Q/S/E/T)(T/K/H/I/E/A/S/N)(P/L/R/T/A/M/V/I/E) (D/E/R/I/G/N)(P/L/A/D/R/W/M)(D/E/S/T/A/G/-)(G/I/S/F/H/-)(R/I/F/P/G/H/L/K/M/-) (R/F/S/G/M/-)(M/V/Y/I/T/-)(P/R/V/-)(R/-)(Q/T/-)(E/A/-)(I/V/S/T/-)(T/L/I/V/H/N/-)(C/-);
or
(xi) Motif 11 as represented by SEQ ID NO: 183: (G/A/S/I/-)(H/F/-)(L/F/-)(G/F/C/-) (H/F)(V/I/S)(F/T/H/L/V)(K/D/P/M/L/I/R)(G/D/N/T/V)(E/G/R/H) (G/P/N/D/W/S)(F/P/H/Y/I/N/R/S)(S/L/P/A/D/G/K/R-)(T/R/N/V/-)(P/D/A/F/T/-) (T/L/F/S/R)(D/G/L/Y/N)(E/K/A/N/Q /L)(R/K/D/E/A/P)(H/Y/I/L/K/C/F) (C/V/-) (V/L/I/S/M/-)(N/Q/K/L/-)(S/L/Q/R/-)(V/I/A /R/Y/-);
wherein the amino acid at each position is given between brackets and “-” represents a gap, that is, the absence of an amino acid at said position.

3. The method of claim 1, wherein said modulated expression is effected by introducing and expressing in a plant a nucleic acid encoding an MSR polypeptide.

4. The method of claim 1, wherein said nucleic acid encoding an MSR polypeptide encodes any one of the proteins listed in Table A1 or is a portion of such a nucleic acid, or a nucleic acid capable of hybridising with such a nucleic acid.

5. The method of claim 1, wherein said nucleic acid sequence encodes an orthologue or paralogue of any of the proteins given in Table A1.

6. The method of claim 1, wherein said enhanced yield-related traits comprise increased yield, preferably increased biomass and/or increased seed yield relative to control plants.

7. The method of claim 1, wherein said enhanced yield-related traits are obtained under non-stress conditions.

8. The method of claim 1, wherein said enhanced yield-related traits are obtained under conditions of drought stress, salt stress or nitrogen deficiency.

9. The method of claim 3, wherein said nucleic acid is operably linked to a constitutive promoter, a GOS2 promoter, or a GOS2 promoter from rice.

10. The method of claim 1, wherein said nucleic acid encoding an MSR polypeptide is of plant origin, from a monocotyledonous plant, the genus Oryza, from Oryza sativa, from a dycotyledoneous plant, from the genus Medicago, or from Medicago truncatula.

11. A plant or part thereof, including seeds, obtainable by the method of claim 1, wherein said plant or part thereof comprises a recombinant nucleic acid encoding an MSR polypeptide.

12. A construct comprising:
(i) a nucleic acid encoding an MSR polypeptide as defined in claim 1;
(ii) one or more control sequences capable of driving expression of the nucleic acid sequence of (i); and optionally
(iii) a transcription termination sequence.

13. The construct of claim 12, wherein one of said control sequences is a constitutive promoter, a GOS2 promoter, or a GOS2 promoter from rice.

14. A method for making plants having increased yield, particularly increased biomass and/or increased seed yield relative to control plants, comprising utilizing the construct of claim 12.

15. A plant, plant part or plant cell transformed with the construct of claim 12.

16. A method for the production of a transgenic plant having increased yield, particularly increased biomass and/or increased seed yield relative to control plants, comprising:
(i) introducing and expressing in a plant the nucleic acid encoding an MSR polypeptide as defined in claim 1; and
(ii) cultivating the plant cell under conditions promoting plant growth and development.

17. A transgenic plant having increased yield, particularly increased biomass and/or increased seed yield, relative to control plants, resulting from modulated expression of the nucleic acid encoding an MSR polypeptide as defined in claim 1, or a transgenic plant cell derived from said transgenic plant.

18. The transgenic plant of claim 11, or a transgenic plant cell derived thereof, wherein said plant is a crop plant or a monocot or a cereal, such as rice, maize, wheat, barley, millet, rye, triticale, sorghum emmer, spelt, secale, einkorn, teff, milo and oats.

19. Harvestable parts of the plant of claim 18, wherein said harvestable parts are preferably shoot biomass and/or seeds.

20. Products derived from the plant of claim 18 and/or from harvestable parts of said plant.

21. A method for increasing yield, particularly in increasing seed yield and/or shoot biomass in plants, relative to control plants, comprising utilizing a nucleic acid encoding an MSR polypeptide.

22. An isolated nucleic acid molecule selected from:
(i) a nucleic acid represented by any one of SEQ ID NO: 31, 33, 41, 105, 107, 109, 113, 115, 117, 119, 121, 123, 125, 165, 167, 169, and SEQ ID NO: 171;
(ii) the complement of a nucleic acid represented by any one of SEQ ID NO: 31, 33, 41, 105, 107, 109, 113, 115, 117, 119, 121, 123, 125, 165, 167, 169, and SEQ ID NO: 171;
(iii) a nucleic acid encoding the polypeptide as represented by any one of SEQ ID NO: 32, 34, 42, 106, 108, 110, 114, 116, 118, 120, 122, 124, 126, 166, 168, 170, and SEQ ID NO: 172, preferably as a result of the degeneracy of the genetic code, said isolated nucleic acid can be derived from a polypeptide sequence as represented by any one of SEQ ID NO: 32, 34, 42, 106, 108, 110, 114, 116, 118, 120, 122, 124, 126, 166, 168, 170, and SEQ ID NO: 172, and further preferably confers enhanced yield-related traits relative to control plants;
(iv) a nucleic acid having at least 30% sequence identity with any of the nucleic acid sequences of table A and further preferably conferring enhanced yield-related traits relative to control plants;
(v) a nucleic acid molecule which hybridizes with a nucleic acid molecule of (i) to (iv) under stringent hybridization conditions and preferably confers enhanced yield-related traits relative to control plants;
(vi) a nucleic acid encoding an MSR polypeptide having at least 50% sequence identity to the amino acid sequence represented by any one of SEQ ID NO: 32, 34, 42, 106, 108, 110, 114, 116, 118, 120, 122, 124, 126, 166, 168, 170, and SEQ ID NO: 172, and any of the other amino acid sequences in Table A1 and preferably conferring enhanced yield-related traits relative to control plants.

23. An isolated polypeptide selected from:
(i) an amino acid sequence represented by any one of SEQ ID NO: 32, 34, 42, 106, 108, 110, 114, 116, 118, 120, 122, 124, 126, 166, 168, 170, and SEQ ID NO: 172;
(ii) an amino acid sequence having at least 50% sequence identity to the amino acid sequence represented by any one of SEQ ID NO: 32, 34, 42, 106, 108, 110, 114, 116, 118, 120, 122, 124, 126, 166, 168, 170, and SEQ ID NO: 172 or any of the other amino acid sequences in Table A1 and preferably conferring enhanced yield-related traits relative to control plants.
(iii) derivatives of any of the amino acid sequences given in (i) or (ii) above.

The application's sequence listing, which the Patent Office published only in electronic form, follows.

SEQUENCE LISTING (386 sequences)

SEQ ID NO: 1 - DNA, 618 bp, Oryza sativa
atgagctggctcgggaagctggggctgggcgggctggggggaagcccgcgggcgtcggcggcgtcggcggcgctggcgcagggccccgatgaggaccgcccggcggccgggaacgagttcgcgcagttcggcgccgggtgcttctggggcgtggagctcgcgttccagcgcgtccccggcgtgactcgcaccgaggtgggatacagccaggggaacctccacgacccgacctacgaggacgtctgcaccggcgccacctaccacaacgaggtcgtccgcgtccactacgacgtctccgcctgcaagttcgacgacctcctcgacgtcttctgggcgcgccacgatcccaccacgcccaaccgccagggtaatgatgttgggacccaatacaggtcaggtatctactactacacccctgagcaggagaaggcggcaagagaatctctggagaagcagcagaagcttctgaatcggacgattgtcactgaaattcttcctgcaaagaggttctacagggcagaggagtaccaccagcaataccttgcgaaaggcggtcgcttcgggttcaggcagtctgcggagaagggttgcaacgaccccatccgttgctacgggtga

SEQ ID NO: 2 - protein, 205 aa, Oryza sativa
MSWLGKLGLGGLGGSPRASAASAALAQGPDEDRPAAGNEFAQFGAGCFWGVELAFQRVPGVTRTEVGYSQGNLHDPTYEDVCTGATYHNEVVRVHYDVSACKFDDLLDVFWARHDPTTPNRQGNDVGTQYRSGIYYYTPEQEKAARESLEKQQKLLNRTIVTEILPAKRFYRAEEYHQQYLAKGGRFGFRQSAEKGCNDPIRCYG

SEQ ID NO: 3 - DNA, 609 bp, Arabidopsis thaliana
atggcttcttctactagattaactattatacaatcaagcttcgtctccgcaagaacaagactcaattacgtctccaagacaaatcattctgggttcgcttgtcgttctctttcaaaacccagaaacttgagtctctctgtttattctatgggttcttctagttcttctccgaaaccagacaacgtccaagaggctgagaagaatgagtttgcttctctaagtgaaaatgaatggaagaaacggctaacaccagaacagtactacatcactagacagaagggcacagagagagctttcactggggagtattggaactcaaagacccctggagtatataattgtgtatgttgcgacacacctctatttgattcatcaacaaagtttgatagtggaacagggtggccatcttactaccaaccaattggaaacaatgtgaagacaaagctagacctctctatcatcttcatgcctagacaagaagttgtctgtgctgtttgtaacgcccatcttggtcatgtctttgacgacggtccacgcccaaccggaaaacgatattgcctcaacagtgctgctctgaaacttaacgcattggagaaaacaagagattga

SEQ ID NO: 4 - protein, 202 aa, Arabidopsis thaliana
MASSTRLTIIQSSFVSARTRLNYVSKTNHSGFACRSLSKPRNLSLSVYSMGSSSSSPKPDNVQEAEKNEFASLSENEWKKRLTPEQYYITRQKGTERAFTGEYWNSKTPGVYNCVCCDTPLFDSSTKFDSGTGWPSYYQPIGNNVKTKLDLSIIFMPRQEVVCAVCNAHLGHVFDDGPRPTGKRYCLNSAALKLNALEKTRD

SEQ ID NO: 5 - DNA, 765 bp, Arabidopsis thaliana
atggctatatcactgaagaggaaccgtttcttcattccttatacgaatctcgtcttcttcttcttcttgtgtgtctctctgctcgataaaactgtatccatcaggatttcgaatcagatctcggatactgtcgttgattctcccgatcgtcctttgaaatctgcggttttcgctcttggaagcttctggagatcggaggcggcgtttggttgtatcaatggcgtcgtacgaacctccgccggttacgccggtggaacgaagacgaatccggagtataggaacttaggtgatcacgccgagtccgtacaggttgaatatgatccaaggataattggttatcgtcagctcttagatgtattttggtctagtcatgattctagacaagtgtttggacaaggtcctgatgtgggtaatcaatacagatcctgtattttcactaattctacagaagaattgagactggcttctaccagcaaagaaagggagcaacttaatacaagaagcagtatcgtgaccactcaaattcaacagctaggaacgttttatcgcgcagagcctgatcaccagaagttcgagctgaaacaacatccatttcttattcagctaattggaaacatggtagaagaagagcttgagagatcagctctagccacaaaactaaacggttacgcagccgagctctgcccgcctagaatccagaaacatatcgactctagagttaatgagatcattagaaaaggttggcccgtcttgagagacatctaa

SEQ ID NO: 6 - protein, 254 aa, Arabidopsis thaliana
MAISLKRNRFFIPYTNLVFFFFLCVSLLDKTVSIRISNQISDTVVDSPDRPLKSAVFALGSFWRSEAAFGCINGVVRTSAGYAGGTKTNPEYRNLGDHAESVQVEYDPRIIGYRQLLDVFWSSHDSRQVFGQGPDVGNQYRSCIFTNSTEELRLASTSKEREQLNTRSSIVTTQIQQLGTFYRAEPDHQKFELKQHPFLIQLIGNMVEEELERSALATKLNGYAAELCPPRIQKHIDSRVNEIIRKGWPVLRDI

SEQ ID NO: 7 - DNA, 531 bp, Arabidopsis thaliana
atgaacatcgtcaattcaaagattctctttttatcattcacgctacttcttcttcttcaatcgtcaatcgttgaatccgattcgatttgcctctcttccggcgtagcttcgacggtggcaatggcggctccgggatcggttcagaaaggagatgaagagtggcgtgcgattctttcacctgaacagtttcggattcttcgtcaaaagggcactgaatatccaggaacaggggaatatgtcaacttcgacaaggaaggagtttacggttgtgtaggatgcaatgctcctctttataaatccaccacaaagttcaacgctggttgtggctggccagctttctttgaaggaatccccggtgccattacccgaacgacagacccagatgggagaagaatagagatcaactgtgcaacatgtggtggacatcttggtcatgttttcaaaggagaaggtttcgctactccaaccgatgaacgccattgcgtgaacagcgtttcgcttaagttcacacccgcagcgtcttccttgtaa

SEQ ID NO: 8 - protein, 176 aa, Arabidopsis thaliana
MNIVNSKILFLSFTLLLLLQSSIVESDSICLSSGVASTVAMAAPGSVQKGDEEWRAILSPEQFRILRQKGTEYPGTGEYVNFDKEGVYGCVGCNAPLYKSTTKFNAGCGWPAFFEGIPGAITRTTDPDGRRIEINCATCGGHLGHVFKGEGFATPTDERHCVNSVSLKFTPAASSL

SEQ ID NO: 9 - DNA, 420 bp, Arabidopsis thaliana
atggcggatcttgtgacggtggttaaaaaaacagaggaggagtggcgtgcagttctttctcctgaacagtttcggattctccgtcaaaagggcactgaaacgccgggaacagaagaatatgacaagttctttgaggaaggaatcttcagctgcatcggatgcaaaactcctctttataaatccaccacgaagtttgacgccggatgcggctggccagctttctttgaaggactccccggtgccattaaccgagcccctgatccagatgggagaagaactgagatcacttgtgccgtatgtgatggacatttaggccatgttcataaaggtgaaggttatagtactccaaccgatgaacgcctttgtgttaacagcgtttcgatcaattttaacccggccaaaccttcctctataacctga

SEQ ID NO: 10 - protein, 139 aa, Arabidopsis thaliana
MADLVTVVKKTEEEWRAVLSPEQFRILRQKGTETPGTEEYDKFFEEGIFSCIGCKTPLYKSTTKFDAGCGWPAFFEGLPGAINRAPDPDGRRTEITCAVCDGHLGHVHKGEGYSTPTDERLCVNSVSINFNPAKPSSIT

SEQ ID NO: 11 - DNA, 420 bp, Arabidopsis thaliana
atggcggcttctccgttggtggttcagaaaacagaggaggagtggcgtgcggttctttctccggagcagtttcgtattcttcgtcaaaaaggcactgaaaagccaggaactggagaatatgacaagtttttcgaggaaggaatcttcgattgcgtaggatgcaagactcctctttataaatcaaccacgaagttcgattccggatgtggctggccagctttctttgaaggactccctggtgccataaaccgaacccctgatccagatgggagaagaactgagatcacttgtgctgcgtgcgatggacatttaggccatgttttcaaaggagaaggttacggtaatccaaccgatgaacgtcattgcgttaacagtgtttcgatcagttttaacccggcaaaatcttcctctataatctga

SEQ ID NO: 12 - protein, 139 aa, Arabidopsis thaliana
MAASPLVVQKTEEEWRAVLSPEQFRILRQKGTEKPGTGEYDKFFEEGIFDCVGCKTPLYKSTTKFDSGCGWPAFFEGLPGAINRTPDPDGRRTEITCAACDGHLGHVFKGEGYGNPTDERHCVNSVSISFNPAKSSSII

SEQ ID NO: 13 - DNA, 462 bp, Arabidopsis thaliana
atgaacacttccccaaaaatggaaatggaaatgaaaatggaaacgaaggcggctcctgaagctggtatgatcaaaaagtccaacgaggagtggcgtacggttctatctcctgaacagtttaagattcttagagagaaatctattgaaaagagagggtcaggagaatatgtgaagttgttcgaggaaggaatctactgttgtgttggttgtggaaatccggtttataaatcaaccactaaattcgattccggttgcggttggccggctttttttgatgctattcctggcgccattaaccgaaccgaggagagagctggattaagatatgagataacttgcacaaaatgtgatggacatctaggtcatgtcttaaaaaatgaaggttttccaacaccaactgacgaacgccattgcgtcaacagcgttgctctcaagttctcttccgctatcacatctcagtga

SEQ ID NO: 14 - protein, 153 aa, Arabidopsis thaliana
MNTSPKMEMEMKMETKAAPEAGMIKKSNEEWRTVLSPEQFKILREKSIEKRGSGEYVKLFEEGIYCCVGCGNPVYKSTTKFDSGCGWPAFFDAIPGAINRTEERAGLRYEITCTKCDGHLGHVLKNEGFPTPTDERHCVNSVALKFSSAITSQ

SEQ ID NO: 15 - DNA, 435 bp, Arabidopsis thaliana
atggcagcaatgaccgcggcagcagttccagcaactggatctttccagaaacaagacgaggagtggcgtgcggttctgtctcctgagcagtttagggttctcagactaaaaggcacagataaacgaggcaaaggagagtttacaaagaagttcgaggaagggacttatagttgtgctggttgtggaactgctctttataaatcgaccactaagttcgactccggttgcggttggcctgcgttcttcgacgccatccccggtgctattaaacaaactccagaagcaggtggaagaagaatggagataacatgtgcagtgtgtgatggacatttaggccatgttttcaaaggcgaaggttactctactccaaccgatcaacgtcactgcgttaacagtgtctctctcaaattctcttctgctggttcctcccaataa

SEQ ID NO: 16 - protein, 144 aa, Arabidopsis thaliana
MAAMTAAAVPATGSFQKQDEEWRAVLSPEQFRVLRLKGTDKRGKGEFTKKFEEGTYSCAGCGTALYKSTTKFDSGCGWPAFFDAIPGAIKQTPEAGGRRMEITCAVCDGHLGHVFKGEGYSTPTDQRHCVNSVSLKFSSAGSSQ

SEQ ID NO: 17 - DNA, 432 bp, Arabidopsis thaliana
atggcaatgaccgcggctgcagttccatcaagtggatctttccagaaacaagacgaagagtggcgtgctgttctgtctcctgagcagtttagggttctcagactaaaaggaacagataaacgaggcaaaggagagtttacaaagaagttcgaggaagggacttatagttgtgctggttgtggaactgctctttataaatcgaccactaagttcgactccggttgcggttggcctgcgttcttcgacgccatccccggtgctattaaacaaactccagaagcaggtggaagaagaatggagataacatgtgcagtgtgtgatggacatctaggccatgttttcaaaggcgaaggttactctactccaaccgatcaacgtcactgcgttaacagtgtctctctcaaattcgcttctgctgattcttccaaataa

SEQ ID NO: 18 - protein, 143 aa, Arabidopsis thaliana
MAMTAAAVPSSGSFQKQDEEWRAVLSPEQFRVLRLKGTDKRGKGEFTKKFEEGTYSCAGCGTALYKSTTKFDSGCGWPAFFDAIPGAIKQTPEAGGRRMEITCAVCDGHLGHVFKGEGYSTPTDQRHCVNSVSLKFASADSSK

SEQ ID NO: 19 - DNA, 432 bp, Arabidopsis thaliana
atgccaacatcagcaacagcggtggctccatcaactggatctgtccagaaaaaagatcaagactggcgtgcgattttgtctcccgagcaatttagagttctcagggaaaagggcacagagaaccgaggtaaaggagagtataccaaactgttcgacgacggaatctatagttgtgctggttgtgcaactcctctttataagtccaccactaagttcgactctggttgtggctggccttccttcttcgatgctatccctggtgccattaaacaaacgcccgaggcaggagggagaagaatggagatcacgtgcgcggcatgtgacggacatttaggtcatgttgtcaaaggagaaggttttcccacagcgaccgatgagcgccactgcgtcaacagtgtttctctcaagttctctgaaatttcctcccaataa

SEQ ID NO: 20 - protein, 143 aa, Arabidopsis thaliana
MPTSATAVAPSTGSVQKKDQDWRAILSPEQFRVLREKGTENRGKGEYTKLFDDGIYSCAGCATPLYKSTTKFDSGCGWPSFFDAIPGAIKQTPEAGGRRMEITCAACDGHLGHVVKGEGFPTATDERHCVNSVSLKFSEISSQ

SEQ ID NO: 21 - DNA, 609 bp, Arabidopsis thaliana
atggcgttcaatatcataacacctggtcgtgtttattcagccacgtctctcactttcgtttccaccattaaagctgctttcgttaaacctcctttggcctctccgtctcgtcgtaacctccttcgtttctcatcatctcctttgtcatttccgtcgctccgtcgaggtttccacggtggtcgtattgtggcaatgggttcttctgctcctgaatcggtcaataagccggaagaagagtggcgtgcgattctttctcctgaacaatttaggattctcagacagaaaggcactgaatatccaggaactggagaatacaacaaagtattcgacgatggcatctattgttgtgcaggatgtggaactcctctctacaaatccaccaccaaattcgactctggttgtggctggccagctttctttgatggactccccggagctataacccgaacccctgatccagatgggagacgaatcgagatcacatgtgctgcttgtggaggacatcttggtcacgtttttaaaggagaaggtttccctactcctaccgatgagcgacactgtgtaaacagtatctctctcaagttcacaccagagaatccgaccctgtaa

SEQ ID NO: 22 - protein, 202 aa, Arabidopsis thaliana
MAFNIITPGRVYSATSLTFVSTIKAAFVKPPLASPSRRNLLRFSSSPLSFPSLRRGFHGGRIVAMGSSAPESVNKPEEEWRAILSPEQFRILRQKGTEYPGTGEYNKVFDDGIYCCAGCGTPLYKSTTKFDSGCGWPAFFDGLPGAITRTPDPDGRRIEITCAACGGHLGHVFKGEGFPTPTDERHCVNSISLKFTPENPTL

SEQ ID NO: 23 - DNA, 777 bp, Arabidopsis thaliana
atgcaggtcctcgtcgtctctcctccgctcatcgccgccgcatctctctctaaacctctcaattctctctctaaagccgcactctctttctccagagccaaacccatttgtcctttccctcaaacctctcgacgaccaatctccgtatacaaatccccaatgaacaaccttttcaacagactcggattcgggtctcgtcctcaagcccaagctgacccatcttccgccgcaatcgcccaaggacccgacgatgatgttccgtcttcaggtcagcaattcgcgcaatttggcgccggttgtttctggggagtggagctagcttaccagagagttcctggtgtgaccaagaccgaggttgggtatagccatggcatcgtgcacaatccgagttacgaggatgtctgtactggcactacgggacataacgaggttgttagagttcagtatgatcccaaagagtgtagctttgagagcttgcttgatgttttctggaatcgtcatgatccaaccaccttgaatcgtcagggtggggatgtgggaacgcagtatcgatcaggtatatactactacacagacgagcaagagcgcatagctcgtgaagctgttgagaaacagcagaagatattgaacaagaggattgtcacagagatacttcccgctacgaaattctacagagcagaaaattaccaccagcaatacctggcaaaagggggtcgcatgggtttaagacaatcagctgagaaaggttgcaaggatccaatccgatgctatggctaa

SEQ ID NO: 24 - protein, 258 aa, Arabidopsis thaliana
MQVLVVSPPLIAAASLSKPLNSLSKAALSFSRAKPICPFPQTSRRPISVYKSPMNNLFNRLGFGSRPQAQADPSSAAIAQGPDDDVPSSGQQFAQFGAGCFWGVELAYQRVPGVTKTEVGYSHGIVHNPSYEDVCTGTTGHNEVVRVQYDPKECSFESLLDVFWNRHDPTTLNRQGGDVGTQYRSGIYYYTDEQERIAREAVEKQQKILNKRIVTEILPATKFYRAENYHQQYLAKGGRMGLRQSAEKGCKDPIRCYG

SEQ ID NO: 25 - DNA, 657 bp, Arabidopsis thaliana
atggattcttctctgaaaactcaggaacctcaagtagtggaaacttctccttctccggtagctcaggagcctcctcaagtagctgacaaacctgcgattgttccttctccgatagctcaagagccagacaacgatgttccggcgccgggaaacgagtttgctgagttcgccgccggttgtttctggggagtggagcttgctttccagagaatccctggcgtgaccgtgactgaggtcggttacactcatgggatctctcacaatccgtcttatgaagatgtctgtacgaacaccacgaaccatgcagaagttgtcagggttcaatatgatcctaaagaatgcacttatgagacacttcttgatttgttttggtctagacataatcctaccaccttgaatcgtcagggagaacttttgggagcacaataccgatcaggtatatatttctacacaccggagcaagagaaactagcacgcgagtctctagagaaagagcagaaaaaactggaggataagattgtgactgagatcttaccggcaaagaaattctacaaagctgaagaataccatcagcagtaccttgtcaaaggtgggatgcatggaaacgctcaatcacctgcaaagagctgcaaggaccctatccgctgctatggctaa

SEQ ID NO: 26 - protein, 218 aa, Arabidopsis thaliana
MDSSLKTQEPQVVETSPSPVAQEPPQVADKPAIVPSPIAQEPDNDVPAPGNEFAEFAAGCFWGVELAFQRIPGVTVTEVGYTHGISHNPSYEDVCTNTTNHAEVVRVQYDPKECTYETLLDLFWSRHNPTTLNRQGELLGAQYRSGIYFYTPEQEKLARESLEKEQKKLEDKIVTEILPAKKFYKAEEYHQQYLVKGGMHGNAQSPAKSCKDPIRCYG

SEQ ID NO: 27 - DNA, 609 bp, Arabidopsis thaliana
atgaacatactcaacagattgggtttgggatcaagtgggcaaaccaatatggatccttctccgatcgctcagggaaatgacgatgacacaccggcgccggggaatcagtttgcccaattcggagctggatgtttctggggtgtcgagctggcgtttcagagagtcccaggggtgactcagaccgaggctggatacacccaagggaccgtagacaatccttcatacggagatgtttgttctggtaccacaggccattcggaggttgttagggttcaatatgatcttaacgattgcacctatgagtctctgcttgatttgttctggtctaggcatgatcccaccactttgaatcgccagggaaatgacgtgggaacccaatacagatctggaatatacttctacacacccgagcaggagaaactagcccgtgagtcacttgaacgtcaccagcaacaaatggagagaaagatcatgactgaaatcttgccagctaagaaattctacagagctgaagagcatcatcaacagtatctgtcaaaaggtgggcggtttggccaagggcaatccactgccaaaggctgcaacgacccaatccgctgttacggctaa

SEQ ID NO: 28 - protein, 202 aa, Arabidopsis thaliana
MNILNRLGLGSSGQTNMDPSPIAQGNDDDTPAPGNQFAQFGAGCFWGVELAFQRVPGVTQTEAGYTQGTVDNPSYGDVCSGTTGHSEVVRVQYDLNDCTYESLLDLFWSRHDPTTLNRQGNDVGTQYRSGIYFYTPEQEKLARESLERHQQQMERKIMTEILPAKKFYRAEEHHQQYLSKGGRFGQGQSTAKGCNDPIRCYG

SEQ ID NO: 29 - DNA, 609 bp, Arabidopsis thaliana
atgaacatacttaacaagctaggtataggatcaagtagacaaaccaacatggatccttctccaatcgcacaagtaatcgacgacgaagctccggcgccgggaaaccagtttactcaattcggcgccggttgtttctggagcgtggaattagcgtaccagagagttccaggagtgactcaaacagaggttggttattctcaagggatcactcacgatccttcttacaaagatgtttgttcaggtaccacgaatcatgccgagattgttcgtgttcaatatgatccaaaagagtgtagttaccagtcgctgcttgatttgttctggtctaagcatgatcccaccactttgaatcggcagggaaatgatgtgggaacccaataccgttcagggatatatttctacaacccggagcaagagaaactagcacgcgagtcactggagcggcaccagcaacaagttgacaggaaggttgtgacagagatcttaccggctaagaaattttatagagctgaggaacatcaccagcaatacttgtctaaaggagggaggtttggtcttaagcaatcaacggaaaaaggctgcaacgacccaatccgctgctacgggtaa

SEQ ID NO: 30 - protein, 202 aa, Arabidopsis thaliana
MNILNKLGIGSSRQTNMDPSPIAQVIDDEAPAPGNQFTQFGAGCFWSVELAYQRVPGVTQTEVGYSQGITHDPSYKDVCSGTTNHAEIVRVQYDPKECSYQSLLDLFWSKHDPTTLNRQGNDVGTQYRSGIYFYNPEQEKLARESLERHQQQVDRKVVTEILPAKKFYRAEEHHQQYLSKGGRFGLKQSTEKGCNDPIRCYG

SEQ ID NO: 31 - DNA, 666 bp, Glycine max
atgaacttgttgagcagaatcgttgggttgggtagcccaagggctgcacaaaacatgaattcaaccactgctcagggaccagatgatgagataccagcaccaggtcaacagtttgcccagtttggtgctggctgcttttggagtgttgagctggccttccagagggcatcaggggtgaccaagacagaagttggttatagccaggggcagttgcctaatccaagctatgaggatgtgtgtacgggaaccacacaccactcggaggttgtcagggtccaatatgatcccaatgtatgtagctatgagagtttgcttgatgtgttctgggctagacatgatcctaccacactgaatcggcagggaaatgatgtgggaacacaatacaggtctggaatatactattacacacctgaacaagagaaggcagccatagagtctttagaacaacaacagaagaagctgaacaggaagattgttactgagatccttcctgccaagaagttctacatggctgaagaataccatcaacagtaccttgagaaaggagggagatttggttccaagcaatctgcttctaagggatgcaatgatccaattctatgctatggttatattaatatgactagatgttttaagcaaggagttttcttgataagtatttcttaa

SEQ ID NO: 32 - protein, 221 aa, Glycine max
MNLLSRIVGLGSPRAAQNMNSTTAQGPDDEIPAPGQQFAQFGAGCFWSVELAFQRASGVTKTEVGYSQGQLPNPSYEDVCTGTTHHSEVVRVQYDPNVCSYESLLDVFWARHDPTTLNRQGNDVGTQYRSGIYYYTPEQEKAAIESLEQQQKKLNRKIVTEILPAKKFYMAEEYHQQYLEKGGRFGSKQSASKGCNDPILCYGYINMTRCFKQGVFLISIS

SEQ ID NO: 33 - DNA, 798 bp, Glycine max
atgagaatttgtggagcagcaatcagcagcagctacaccaccacgtccaattcccttttagtgtttgcttcctcttccctctccagtcctgcaaaaaccaagttcctgccctcactttctagattttctgtcaagcgtccgtacttcctttcccaaacttatccgcgcattgctgtgaacaagccctccatgaacctgttgaacagactcgggtttggcagcgcaagagcaacagagaacatggattcatccattcctcagggtccagatgatgacataccagcaccaggccagcagtttgccgagtttggtgctggctgtttttggggtgttgagttggccttccagagggtgcctggggtgaccaagacagaggttggttacacccaggggcttgtgcataatccaacctatgaggatgtgtgtacagggaccaccaaccactcagaggttgtaaggattcaatatgatccaaaaaattgcagctatgagactctgcttgacatgttctggtctagacatgatcctaccactctgaatagacaggggaatgatgtgggaacacagtacagatctggaatatactactacacgccggaacaagagaaggcggccaaggagtcgttggaacaacagcagaagcagttgaacaggaagattgtcactgagatccttcctgccaaaaagttctacagggcagaggagtaccatcaacagtaccttgagaagggtggccgatttggtttcaagcaatctgcttctaaaggctgcaatgatccaatccggtgctacggttaa

SEQ ID NO: 34 - protein, 265 aa, Glycine max
MRICGAAISSSYTTTSNSLLVFASSSLSSPAKTKFLPSLSRFSVKRPYFLSQTYPRIAVNKPSMNLLNRLGFGSARATENMDSSIPQGPDDDIPAPGQQFAEFGAGCFWGVELAFQRVPGVTKTEVGYTQGLVHNPTYEDVCTGTTNHSEVVRIQYDPKNCSYETLLDMFWSRHDPTTLNRQGNDVGTQYRSGIYYYTPEQEKAAKESLEQQQKQLNRKIVTEILPAKKFYRAEEYHQQYLEKGGRFGFKQSASKGCNDPIRCYG

SEQ ID NO: 35 - DNA, 606 bp, Hordeum vulgare
atgagctttgccagacccctaatctcccaaccttttctccgaagcttattaaccatgagcgggaaaccagtctgtatagataattctacaacagcggctcaaaaagcaacttttgctgctggctgtttctggggcgttgagaaaatgtgtcgggaaagctttgcatcacgcggcttggttgaagcacgcgtaggctacacaggtggtttatcttccaaccccttataccgtgctgtctgctctggtcaaacgggccattctgaggcgcttcaggtaacttttgatccgcagaaagtctcataccgacaacttgtcgagtttttttaccaaatgcacgatccgacgaccttccatcgtcaaggtgcggatcagggctcgcaatatcgttcggccatcttctatcacaaccaagagcaggaacaggtggctcgtcaagtcacccagaaagtcaacgagcaatggtggaagaacaaagtgactacagaaattgtcccggctggcgaatggtgggatgccgagcaatatcatcaacaatatttgaacaaaaaccctggcggatatgaatgtcctaatcatgtcctgcgaaaatttccgcccctactatag

SEQ ID NO: 36 - protein, 201 aa, Hordeum vulgare
MSFARPLISQPFLRSLLTMSGKPVCIDNSTTAAQKATFAAGCFWGVEKMCRESFASRGLVEARVGYTGGLSSNPLYRAVCSGQTGHSEALQVTFDPQKVSYRQLVEFFYQMHDPTTFHRQGADQGSQYRSAIFYHNQEQEQVARQVTQKVNEQWWKNKVTTEIVPAGEWWDAEQYHQQYLNKNPGGYECPNHVLRKFPPLL

SEQ ID NO: 37 - DNA, 552 bp, Hordeum vulgare
atgagcgggaaaccagcctgcacagataactctacaacagcggctcaaaaggcaacttttgctgccggctgcttctggggcgtcgagaaaatgtttcgggaaagcttcacatcgcgcggcttggtcgaagcacgcgtgggctacactggtggcctatcttccaaccccttataccgtgctgtctgctctggtcaaacgggtcattctgaggcgcttcaggtaacctttgatccgcagaaagtctcttaccgacaacttgtcgagtttttttaccaaatgcacgatccgacgacctttcatcgtcaaggtgcggaccagggctcgcaatatcgttcggccatcttctatcacaaccaagagcaggagcaggtggctcgtcaagtcacccagaaagtcaacgagcaatggtggaagaacaaagtgactacagaaattgccccggctggcgaatggtgggacgccgaacaatatcatcaacaatacttgagtaataatcctcgcggatatgaatgtcccaatcacgtcctacgtgaatttccgcctctactatag

SEQ ID NO: 38 - protein, 183 aa, Hordeum vulgare
MSGKPACTDNSTTAAQKATFAAGCFWGVEKMFRESFTSRGLVEARVGYTGGLSSNPLYRAVCSGQTGHSEALQVTFDPQKVSYRQLVEFFYQMHDPTTFHRQGADQGSQYRSAIFYHNQEQEQVARQVTQKVNEQWWKNKVTTEIAPAGEWWDAEQYHQQYLSNNPRGYECPNHVLREFPPLL

SEQ ID NO: 39 - DNA, 549 bp, Hordeum vulgare
atgtcgtcgagcaccggcgcggcgggcccggacgccgacgcgccggccggcgaggggctggagctggcgcagttcggggcgggctgcttctggagcgtggagctggcgtaccagcggctccccggcgtggcgcgcacggaggtgggctactcgcagggggacctcgacgggccgacctaccgcgacgtctgcggcggcggcaccggccactccgaggtggtgcgcgtgcactacgaccccaaggattgcccctacgccgtgctcctcgacgtcttctgggccaagcacaaccccaccacgcttaacaagcagggcaacgacgtcgggacgcagtaccggtcgggcatctactactacacggcagagcaggagcggcaggcgcgggagtcgctggcggagaagcagcgggagtggaaggagaagatcgtgacggaggtcctcccggccaggaggttctacccagctgaggactaccaccagcagtacctcgagaagggcggccagtccgccaagaaacgctgctccgaccccatccgctgctacggctga

SEQ ID NO: 40 - protein, 182 aa, Hordeum vulgare
MSSSTGAAGPDADAPAGEGLELAQFGAGCFWSVELAYQRLPGVARTEVGYSQGDLDGPTYRDVCGGGTGHSEVVRVHYDPKDCPYAVLLDVFWAKHNPTTLNKQGNDVGTQYRSGIYYYTAEQERQARESLAEKQREWKEKIVTEVLPARRFYPAEDYHQQYLEKGGQSAKKRCSDPIRCYG

SEQ ID NO: 41 - DNA, 615 bp, linum usitatissimum
atgaacatcctcaacaaactcggcttcggtttcatgtcgtcgccggactcctcctccatggacccgacgattccgcagagcccagacgacgacgtcccctccgccggacagcagttcgcccaattcggagccgggtgcttctggggagtggaattggctttccagagagtcccaggcgttaccaagacggaagtcgggtatacacagggtctgcttcataatcctagctaccaggatatctgtactggtaccaccagccattctgaggttgttagggttcagtatgatccaaaggagtgtagctacgactccctgcttgatgtcttctgggctagacatgaccccactacgctcaatcgccagggaaatgatgtgggaacacagtacagatccgggatatactattataccccggaacaggaggaagctgcaaaggcgtcaaaggaacgacatcagaagctctacaatcgaaacattgtgaccgagattttgccggcgaagaagttctaccgagctgaagagtaccaccagcagtaccttgctaaaggcggccgtatgggattgaagcagtctgctgagaagggctgtaacgatccgatcagatgctatggctaa

SEQ ID NO: 42 - protein, 204 aa, linum usitatissimum
MNILNKLGFGFMSSPDSSSMDPTIPQSPDDDVPSAGQQFAQFGAGCFWGVELAFQRVPGVTKTEVGYTQGLLHNPSYQDICTGTTSHSEVVRVQYDPKECSYDSLLDVFWARHDPTTLNRQGNDVGTQYRSGIYYYTPEQEEAAKASKERHQKLYNRNIVTEILPAKKFYRAEEYHQQYLAKGGRMGLKQSAEKGCNDPIRCYG

SEQ ID NO: 43 - DNA, 609 bp, Medicago truncatula
atgaaccttctgaacaaacttggatttggcagtggaaggtcatcagagagcatggattcaaccattcctcagggaccagatgacgatataccagcaccaggccagcagtttgctcaatttggggctggctgcttttggggtgttgaattggtcttccagagggttcctggagtgagtaagacagaggttggttacacccaggggcttttgcacaatcctacttatgaggatgtgtgttcagggaccacaaaccataacgaggttgtaagggtccaatatgatcccaaacaaggcaccttcgaaaatctgcttgatacattctggtcgaaacacgatcctactacgccaaatcgacaggggaatgatgtgggaacacagtacagatctggaatatacttttacactcctgaacaagagaaaatagctaaagagtctttggaacaacaagagaagcaattgggcaggaagattgctactgagattcttcctgccaagaagttctacagggctgaggagtaccatcaacagtaccttgagaaagggggtcgattcggtttcaagcaatctgctgctaaaggatgcaatgacccaattcggtgctatggttaa

SEQ ID NO: 44 - protein, 202 aa, Medicago truncatula
MNLLNKLGFGSGRSSESMDSTIPQGPDDDIPAPGQQFAQFGAGCFWGVELVFQRVPGVSKTEVGYTQGLLHNPTYEDVCSGTTNHNEVVRVQYDPKQGTFENLLDTFWSKHDPTTPNRQGNDVGTQYRSGIYFYTPEQEKIAKESLEQQEKQLGRKIATEILPAKKFYRAEEYHQQYLEKGGRFGFKQSAAKGCNDPIRCYG

SEQ ID NO: 45 - DNA, 591 bp, Medicago truncatula
atggctacaagtgaaggcggaaacgggaaccacaacactgcctttgacccggatttggatattccggataacccggatgacgagtttgctgagtttggtgcgggttgtttctggggtgtggagcttgcttttcagcgagttccgggagtggtgaagactgaggtcggatatacacagggtcatacaccggatcctaattacaaactggtttgtactggaactaccaatcatgtggaagttgttcgggttcagtttgacccgaaactgtgtccttacacgaatctattggatctgttttggtcacgacatgaccccactaccctgaatcgtcagggaggtgatgtaggtgcacaatatagatcaggaatatattactacaatgaaacacagtctcgtttagcccaagaatcaaaagaagctaaacaattggaacataaggacaagattgtaactgaaattcttccagcaaagaggttttatagagctgaggaatatcatcagcagtatttggaaaagggtggaggcaaaggccgaggtcacggtcagtctgctcaaaagggctgtaatcatcccataaggtgctatggatga

SEQ ID NO: 46 - protein, 196 aa, Medicago truncatula
MATSEGGNGNHNTAFDPDLDIPDNPDDEFAEFGAGCFWGVELAFQRVPGVVKTEVGYTQGHTPDPNYKLVCTGTTNHVEVVRVQFDPKLCPYTNLLDLFWSRHDPTTLNRQGGDVGAQYRSGIYYYNETQSRLAQESKEAKQLEHKDKIVTEILPAKRFYRAEEYHQQYLEKGGGKGRGHGQSAQKGCNHPIRCYG

SEQ ID NO: 47 - DNA, 411 bp, Oryza Sativa
atggcgtcgtcgggggacagcagcggcaagcagcggagcgacgaggagtggcgcgccgtcctctccccggagcagttccgcatcctccgcctcaagggcaccgagttacctggaacaggtgagtacaacaagttctatggtgatggggtctacaactgtgctggctgtggaacacccctgtacaaatccacaaccaagtttgattctggttgtggctggccagcattttttgagggacttcctggagccataaaccgaacaccggatcctgatggaaggagggtagaaatcacgtgtgcagcttgcggtgggcatttgggtcacgtgttcaaaggagaaggcttcaagacgcctactgatgagcgtcactgtgtgaacagtgtttcgatcaagttcaccccggcctcctaa

SEQ ID NO: 48 - protein, 136 aa, Oryza Sativa
MASSGDSSGKQRSDEEWRAVLSPEQFRILRLKGTELPGTGEYNKFYGDGVYNCAGCGTPLYKSTTKFDSGCGWPAFFEGLPGAINRTPDPDGRRVEITCAACGGHLGHVFKGEGFKTPTDERHCVNSVSIKFTPAS

SEQ ID NO: 49 - DNA, 564 bp, Oryza Sativa
atgtccgactccaaccccggcgcggcgaaccctgccctggggccggacgccgacgcggcggccggcgagggccttgagctggcgcagttcgcggcggggtgcttctggagcgtggagctgacgtaccagcgtctcccgggcgtggcgcgcacggaggtgggctactcgcagggccaccgccacgagccgacctaccgcgacgtctgcggcggcggcacggggcacgccgaggtggtgcgcgtgcactacgaccccaaggcctgcccctacgaggtcctcctcgacgtcttctgggccaagcacaaccccaccacgctcaacagacagggcaacgacgtcgggacgcagtaccggtcgggcatctactactacacggcggagcaggagaaggcggcgcgggattcgctggcggagaagcagaaggagtggaaggagaggatcgtgacggagatcctcccggcgacgaggttctaccccgccgaggagtaccaccagcgctacctcgagaagggcggccagtccgccaagaagagctgcaacgaccccatccgttgctacggctga

SEQ ID NO: 50 - protein, 187 aa, Oryza Sativa
MSDSNPGAANPALGPDADAAAGEGLELAQFAAGCFWSVELTYQRLPGVARTEVGYSQGHRHEPTYRDVCGGGTGHAEVVRVHYDPKACPYEVLLDVFWAKHNPTTLNRQGNDVGTQYRSGIYYYTAEQEKAARDSLAEKQKEWKERIVTEILPATRFYPAEEYHQRYLEKGGQSAKKSCNDPIRCYG

SEQ ID NO: 51 - DNA, 690 bp, Oryza Sativa
atgggcgtccagcatctgctcaagctgaggatggcgtcgccccacccgcacccgcaccccggcgcgccgctcgccgcgcgcccgctctccgcgctcgcctccttcttcctcgcccggccctcctccaccgccgccgcgcctcctcctcggcacgtcaccctctcgtgctcgcggccgcactgcaaccacaaccagtgggccgccagccggtgccgcgggacggcgggccggcggcggctgcaggtcgtcgtggcgatgtcctcgtcggcgccgccgccgcctccgggatccgtgcagaagtcggaggaggagtgggaggccatcctctcgccggagcagttccgcatcctccgcctcaagggcacggagtatcctggaacaggtgaatatgacaagctcttcgctgagggtgtttatgaatgtgctggatgcgggactccattgtacaagtcatctactaaattcaactcaggttgtggttggccagcattctatgaaggatttcccggagccatcgcacgaacgcctgatcctgatggcaggcgaatagagatcacctgtgcggcttgcggaggacatttaggacatgtcttcaaaggggaggggttcaacacgcctacagatgagcggcattgtgttaacagtatctcactcaagttcattccagcctcagaagatagtaagctttga

SEQ ID NO: 52 - protein, 229 aa, Oryza Sativa
MGVQHLLKLRMASPHPHPHPGAPLAARPLSALASFFLARPSSTAAAPPPRHVTLSCSRPHCNHNQWAASRCRGTAGRRRLQVVVAMSSSAPPPPPGSVQKSEEEWEAILSPEQFRILRLKGTEYPGTGEYDKLFAEGVYECAGCGTPLYKSSTKFNSGCGWPAFYEGFPGAIARTPDPDGRRIEITCAACGGHLGHVFKGEGFNTPTDERHCVNSISLKFIPASEDSKL

SEQ ID NO: 53 - DNA, 765 bp, Oryza Sativa
atggcacgcggatccgccgccgcggcgatcgccggagttgtgtgggtgcttctcctcctcgtgggggtggcgtcgggggcgcgtcttccgggcgggagcgggggtaaccgggggcgggagccgcgcgggggagcggcggcggcggcggtggccacggagacggcggtgttcgcgctgggaagcttctggaggtcggaggccgcgttcgggtgcctccccggcgtgatccgcacctccgtcggctacgccggcgggtccaaggcccgccctgagtaccgcaacctcggcgaccacgccgagtgcgtcaaggttgaatatgatccccggttgattcagtacaagaaacttctagaggtcttctgggcaagtcatgatccacgagaggtctttgggcaaggaccagatgttggcaaccaatacagatccatcatcttcacaaatggatccgtggaagctagattggctggtcttagcaaagaaaaagaacaagctaaggatcgccgcagtgtcattaccacacagatccaaccaataggtgcattttatccggctgaaccggaacatcagaaatttgagctgaagcgcaagccgtttctcctgcaactgattgggaacctgcccgaggaggagctcctgacctcaacactagctgcaaagttgaatgcatacgctgctgagctctgctccccaaatacccagaacagaataaactccaagattgatgagattgctaagaaaggatggcccatcctaagagacatttag

SEQ ID NO: 54 - protein, 254 aa, Oryza Sativa
MARGSAAAAIAGVVWVLLLLVGVASGARLPGGSGGNRGREPRGGAAAAAVATETAVFALGSFWRSEAAFGCLPGVIRTSVGYAGGSKARPEYRNLGDHAECVKVEYDPRLIQYKKLLEVFWASHDPREVFGQGPDVGNQYRSIIFTNGSVEARLAGLSKEKEQAKDRRSVITTQIQPIGAFYPAEPEHQKFELKRKPFLLQLIGNLPEEELLTSTLAAKLNAYAAELCSPNTQNRINSKIDEIAKKGWPILRDI

SEQ ID NO: 55 - DNA, 639 bp, Oryza Sativa
atgcggcaatacgcggctgctaccgctgcctcctccagtttcagagcacgtccacgggcgcgcccctcctgcctcccagccgccgccctgcccttggcgccttgctgtggtgtggcgtggagccgtgctagctacaggcgagcctccgttcgtgccatgggtgccgcttcatcgtcttcgtcgtcgtcgtcgtcgtctccgtcgccgcagggtcaagcccaagcccaagcccaaggtaaaccgaactacagtacatctctgactgatgaggagtggaggaagcgcctgacaaaagatcagtattacattactcggcagaagggcacagaaagagcatttactggggaatactggaacaccaaaaccccgggcatctaccattgtgtctgctgtgacacccctctttttgagtcatcgaccaaatttgatagtggtactgggtggccgtcatattatcaacccattggagataatgtaaagtgcaagcttgatatgtccatcatattcatgcctcggactgaggtgctgtgtgctgtctgtgacgctcatctggggcacgtgtttgatgatgggccacgaccaacagggaaaagatactgtatcaatagcgcatctctcaagctgaagaagacccagtag

SEQ ID NO: 56 - protein, 212 aa, Oryza Sativa
MRQYAAATAASSSFRARPRARPSCLPAAALPLAPCCGVAWSRASYRRASVRAMGAASSSSSSSSSSPSPQGQAQAQAQGKPNYSTSLTDEEWRKRLTKDQYYITRQKGTERAFTGEYWNTKTPGIYHCVCCDTPLFESSTKFDSGTGWPSYYQPIGDNVKCKLDMSIIFMPRTEVLCAVCDAHLGHVFDDGPRPTGKRYCINSASLKLKKTQ

SEQ ID NO: 57 - DNA, 792 bp, Oryza Sativa
atgcctcctctcctcgcctccacctcctccacgtcccctctcctcctcgcctctcgcctccgcggaggcggcggctgcggctgcggcggcgcccctctcctccaccggacgcgccgcggcttcctcgcgccgagcaccaccaccacccagacgacgaggacgagtttcgcggcgatgagctggctcgggaagctggggctgggcgggctggggggaagcccgcgggcgtcggcggcgtcggcggcgctggcgcagggccccgatgaggaccgcccggcggccgggaacgagttcgcgcagttcggcgccgggtgcttctggggcgtggagctcgcgttccagcgcgtccccggcgtgactcgcaccgaggtgggatacagccaggggaacctccacgacccgacctacgaggacgtctgcaccggcgccacctaccacaacgaggtcgtccgcgtccactacgacgtctccgcctgcaagttcgacgacctcctcgacgtcttctgggcgcgccacgatcccaccacgcccaaccgccagggtaatgatgttgggacccaatacaggtcaggtatctactactacacccctgagcaggagaaggcggcaagagaatctctggagaagcagcagaagcttctgaatcggacgattgtcactgaaattcttcctgcaaagaggttctacagggcagaggagtaccaccagcaataccttgcgaaaggcggtcgcttcgggttcaggcagtctgcggagaagggttgcaacgaccccatccgttgctacgggtga

SEQ ID NO: 58 - protein, 263 aa, Oryza Sativa
MPPLLASTSSTSPLLLASRLRGGGGCGCGGAPLLHRTRRGFLAPSTTTTQTTRTSFAAMSWLGKLGLGGLGGSPRASAASAALAQGPDEDRPAAGNEFAQFGAGCFWGVELAFQRVPGVTRTEVGYSQGNLHDPTYEDVCTGATYHNEVVRVHYDVSACKFDDLLDVFWARHDPTTPNRQGNDVGTQYRSGIYYYTPEQEKAARESLEKQQKLLNRTIVTEILPAKRFYRAEEYHQQYLAKGGRFGFRQSAEKGCNDPIRCYG

SEQ ID NO: 59 - DNA, 678 bp, Ostreococcus tauri
atgatcggcgtcgggggcgacgggatcgtgtccgcggcggaggcgttgccgggacgggcggaggcgatgcggacgccggaggcgcactacgtcttgcgaccgaatcgaatgacggcgccgtggccggagggacacgaagtggcggtgatcgcgagtggatgcttctgggggagcgaaaagggggcgtggcgcatcccaggggtgtactccacggcggtggggtacgtgggcggacacacgaagaatccgacgtacgaagaggcgtgcagcggacgaacgggacacacggagggggtgcagatcgtgttcgatccgaacgtggtgtcgtacgcggatattctggcgttattttggacgtcgcacgatccgacgcagggaatgcgacaagggaacgatcgcgggacgcagtacaggagcggtatttactgcacgacggatgcgcagttgaagatggcgctcgactccaaggaggcgtacgaacgcgctctgaaggcttcgggacgcggctcgatcacgactgagatcaagggcccgggtgacgtgttttactacgccgaagcgtaccaccagcaatacttggcgaaacccaacgctcgaccggtgcgcatcgacggaatcgacgcgacgacgcgaggacgagtctcgatcgaaaacctcgtttcgcgaacacacgactga

SEQ ID NO: 60 - protein, 225 aa, Ostreococcus tauri
MIGVGGDGIVSAAEALPGRAEAMRTPEAHYVLRPNRMTAPWPEGHEVAVIASGCFWGSEKGAWRIPGVYSTAVGYVGGHTKNPTYEEACSGRTGHTEGVQIVFDPNVVSYADILALFWTSHDPTQGMRQGNDRGTQYRSGIYCTTDAQLKMALDSKEAYERALKASGRGSITTEIKGPGDVFYYAEAYHQQYLAKPNARPVRIDGIDATTRGRVSIENLVSRTHD

SEQ ID NO: 61 - DNA, 774 bp, Ostreococcus tauri
atgcaagctattcggaacatgttcggcggcgccggcggcgaacgcgtaccgatgaagatcaatccaaaacatttcattctgaaaactgacgtcacgaccgtcccttccggtcacgcgagcttcgtcgccgccaccgggtgcttctggggcagcgagaagatgttctggcgcgtcccaggggttcgggcgacgtcggtggggtacattgcgggtaagattgagcacccgacgtacgaggagatttgcggcggacgcacgggacacgccgagtgcgttcgggtgatctacgacccgaagatcgtgtcgttcgcggatctgttggcgatgcactggacatcgcatgacccgacgcagggtgatgggcaagggaacgatcgcgggacgcagtacaggagcggattgtattgctcgacggatgagcagttgaagatggcgagagactcgagagaggcagatcacgaccgagatcaaggggcccggggatactttttacttcgccgaggattaccatcagcagtacttgggtgcgtttgtctttcaaatctctttcgcgacgttctcacgactcctctcttttcacgcgcagcgaaaccgggatctagaaagtactgcagcgccgagcccacgggcgtgcccatgcccactgcgtggctcaaggcgaacggggggaaatttggaccgggtttttgggccaagtacggtcctaaaccggggtgcacgatcggcgtcccggacgcgcaagtctcgctcgacgccgcgctcgaagcaaagtga

SEQ ID NO: 62 - protein, 257 aa, Ostreococcus tauri
MQAIRNMFGGAGGERVPMKINPKHFILKTDVTTVPSGHASFVAATGCFWGSEKMFWRVPGVRATSVGYIAGKIEHPTYEEICGGRTGHAECVRVIYDPKIVSFADLLAMHWTSHDPTQGDGQGNDRGTQYRSGLYCSTDEQLKMARDSREADHDRDQGARGYFLLRRGLPSAVLGCVCLSNLFRDVLTTPLFSRAAKPGSRKYCSAEPTGVPMPTAWLKANGGKFGPGFWAKYGPKPGCTIGVPDAQVSLDAALEAK

SEQ ID NO: 63 - DNA, 507 bp, Physcomitrella patens
atggcgcaactggcgacttttgctgctggatgtttctggagcgtggaattggcgtttcagcgcgttcctggtgttaccaagacatcggttggttacactcaggggaaaacggagaatcctacatacagggacgtctgcagcgggaagactgggcatgtggaagccgtgcaaatggagtatgatccttctcaggtctcttacaagcagctcctcgatgtcttctggaagaaacatgatcccactcagaagaaccgccagggtaacgacgtaggatcacagtaccgctcgggaatctattatcacacggaggagcagaaagtggaggcaattgcctcaatgaaggaggaagaagctcggttgaagaagcaaattgccacagagattcttcccgcaacaacttattatctggcggaggagtatcatcagcagtatctggagaagggcgtaagcgggcggaaacaatcagctgccaagatgtgcaatgaccccatccgctgttacggttaa

SEQ ID NO: 64 - protein, 168 aa, Physcomitrella patens
MAQLATFAAGCFWSVELAFQRVPGVTKTSVGYTQGKTENPTYRDVCSGKTGHVEAVQMEYDPSQVSYKQLLDVFWKKHDPTQKNRQGNDVGSQYRSGIYYHTEEQKVEAIASMKEEEARLKKQIATEILPATTYYLAEEYHQQYLEKGVSGRKQSAAKMCNDPIRCYG

SEQ ID NO: 65 - DNA, 255 bp, Physcomitrella patens
atgcaggcggtgaggttgtctgggacgatctgcgcgtcgttgctggcgcagagcgaagctcaattgggagccgctggaacattgcacacgaaagcggtgttgctgggcgcgaggccgtcgaggagtttgtctgtgaggagagggtcgtcgttctccgggacgagaatggcgtcggagaagggcggctggatggagaagttggggtttggtgcgcgggcttcggcagcgcaggcaactggcgcggcggggagctcg

SEQ ID NO: 66 - protein, 267 aa, Physcomitrella patens
MQAVRLSGTICASLLAQSEAQLGAAGTLHTKAVLLGARPSRSLSVRRGSSFSGTRMASEKGGWMEKLGFGARASAAQATGAAGSSTGARSPDDDVPAPGHEFATFGAGCFWGVELAFQRVHGVSHTEVGYTQGHIDNPDYYAVCSGDTGHSEVVRVQYDPKECSYNTLLDVFWKRHDPTTLNRQGNDRGTQYRSGIYFYSPEQEKAALESKEQVQKTLSNPIVTEILPAKKFYRAEEYHQQYLAKGGRGGNAQSPAKGCTDPIRCYG

SEQ ID NO: 67 - DNA, 819 bp, Physcomitrella patens
atgtcgcaggccacatcgttcgctgcaacagcaggcaccctcgtggtagcctcggcgcgggccaacgccagctcttcctgttccaccactcgcagctcgcaattgggttcctccttcttcgaccggaggttgaagatccgtcaagttactaagggatctctcgccaaggggtcgcagagggaggtcactgctgtgagagccatggacagctttctgggaatgttgggactcggctcgcacggccctgcgaacttcgaccctgctgatgttgcgattgcgcagggtccggacgatgacaaacccgtgagtggatgcgagttcgcatgttttggagctgggtgcttctggggcgtggagctcgcgtatcagcgtgtgccaggtgtgtacaagacagaagtgggttacacgcaagggcaaatgcacatgcccacatatgaggccgtctgctcgggcatgacaggtcattctgaagttgttagggtgcagtataatcctgcggaggtcagttacgagactctgctcggtgtattctgggatcgtcatgatcccacaaccctaaatcgacagggtggtgatgttggaactcaatatcgatctggtatctacacctacacgcctgagcaagagagaatagccaagcagtcactcgaaaaccaccagaggtccttgaaccggaaaattgtgaccgagatccttccggccaaaaagttctatcgagcagagaactatcaccagcagtatttggctaagggtggcaggatgggctttaagcagtccgcagagaagggatgcaaggacccaatccggtgctacggctaa

SEQ ID NO: 68 - protein, 272 aa, Physcomitrella patens
MSQATSFAATAGTLVVASARANASSSCSTTRSSQLGSSFFDRRLKIRQVTKGSLAKGSQREVTAVRAMDSFLGMLGLGSHGPANFDPADVAIAQGPDDDKPVSGCEFACFGAGCFWGVELAYQRVPGVYKTEVGYTQGQMHMPTYEAVCSGMTGHSEVVRVQYNPAEVSYETLLGVFWDRHDPTTLNRQGGDVGTQYRSGIYTYTPEQERIAKQSLENHQRSLNRKIVTEILPAKKFYRAENYHQQYLAKGGRMGFKQSAEKGCKDPIRCYG

SEQ ID NO: 69 - DNA, 618 bp, Physcomitrella patens
atggatagtttcttgagcatgctgggtttcaattctcgacgagcttcctcgtacaacccagctgacgttgctatttcagaagggccggatatcgacaagcccgcgagtgggaatcagtttgcttgttttggagctgggtgtttctggggcgtggagcttgcgtatcagcgcgtgccgggtgtgacctacacggaggttgggtatacgcaggggcaattgcacaaccctacatacgaagcagtctgctcgggcgacacaggacattcagaagtagtgaggttacagtataatccagctgaagtcagttacgaggatttgctcaatgtattttggaatcgccatgatcctactacgctcaaccgccaggttggtgattctggaccacaataccgatctggcatctactactactcacctgagcaagaaagagtagccaaggaatcacttgcaaaccatcagaaatctctgagccgaaagattgttactgaggttctcccagctaaaaagttctacaaagcagagtcctatcatcagcagtatttaagtaagggtggcaggatgggttcaaaacagtcagcagcgaaaggttgcaaagattctatcagatgctacggctga

SEQ ID NO: 70 - protein, 205 aa, Physcomitrella patens
MDSFLSMLGFNSRRASSYNPADVAISEGPDIDKPASGNQFACFGAGCFWGVELAYQRVPGVTYTEVGYTQGQLHNPTYEAVCSGDTGHSEVVRLQYNPAEVSYEDLLNVFWNRHDPTTLNRQVGDSGPQYRSGIYYYSPEQERVAKESLANHQKSLSRKIVTEVLPAKKFYKAESYHQQYLSKGGRMGSKQSAAKGCKDSIRCYG

SEQ ID NO: 71 - DNA, 747 bp, Physcomitrella patens
atgggagttgaggtggtatgtcagatggtgaagtctagggttttgtatttatgggctgtgactgtgggagtcttggtcgttcaagtggtcgcaatcagacccgatcagacttcgaagaacatgggagaaacgagggttgcttcctttgcgctgggatccttttggcgaggagaggcagcgtttggttgtttgccaggggtggtgagaactagggcggggtatgcgggagggttgaaacaaaaccctgattaccacagcgttggcgatcatgccgaagctgtagaggtagaatataacccaagcatgatctcgtttgagcagctgttgaaggttttttgggccaatcacgatcccactcaaattttcgggcagggtccagacgttggtccgcagtacaggtcggtggttttcacacaagacgatgaggaagctgctgtagccgcaaagagcaaagcggcggagcagaataagctgccacagagcgaagttgtgacagagattcagagtatgggggttttctacctcgcagaggcagaacatcagaaattcgagcttcgaaggaaaccccaattgttccaacttttgggcgatatttcagacgaagacctgacttcttcagttttggcgacgaagctgaacggatatgctgcaaatttgtgccctccaaacatgaagaaactcctggatactaaggtcagtccttttctgctgactcgacctaatctacagcagattctgcagttttag

SEQ ID NO: 72 - protein, 248 aa, Physcomitrella patens
MGVEVVCQMVKSRVLYLWAVTVGVLVVQVVAIRPDQTSKNMGETRVASFALGSFWRGEAAFGCLPGVVRTRAGYAGGLKQNPDYHSVGDHAEAVEVEYNPSMISFEQLLKVFWANHDPTQIFGQGPDVGPQYRSVVFTQDDEEAAVAAKSKAAEQNKLPQSEVVTEIQSMGVFYLAEAEHQKFELRRKPQLFQLLGDISDEDLTSSVLATKLNGYAANLCPPNMKKLLDTKVSPFLLTRPNLQQILQF

SEQ ID NO: 73 - DNA, 468 bp, Populus trichocarpa
atgggcaggcttcccgcccgactgggcttcctccatcgagatcagctgttcatcatgagctttcccatccacaagaccgaacaggaatggcaggccgagctgcaggccaagggcgccgaacctgccgccttccaggtgacacgccatgcagccaccgagcgcccgttcaccggccgctatgagcagttctgggccgatggcagctaccactgcatctgctgcggcagcaagctgttcgactccgacaccaagttcgatgccggctgcggctggcccagcttcgaccgcgccatccccggcgccatcaccgaaatcgtggaccgcagccacggcatggtgcgcaccgaaaccgtctgcagccagtgcggcgcccacctggggcatgtattccccgacggcccctccgacacagggctgcgctactgcatgaattccgcatcgctggaattcgagccgcccaaggcctag

SEQ ID NO: 74 - protein, 155 aa, Populus trichocarpa
MGRLPARLGFLHRDQLFIMSFPIHKTEQEWQAELQAKGAEPAAFQVTRHAATERPFTGRYEQFWADGSYHCICCGSKLFDSDTKFDAGCGWPSFDRAIPGAITEIVDRSHGMVRTETVCSQCGAHLGHVFPDGPSDTGLRYCMNSASLEFEPPKA

SEQ ID NO: 75 - DNA, 471 bp, Populus trichocarpa
atgcgcatcaccagacgctttctgctttcgggcggctcgctgaccgctacgcttgccgccgtcggcggctggcggctgctggccgccggcaatgccaacgccgccggaagcggcgcccaatccttcgaagtcacattgagcgatgaggcgtggcgccagaagctgacgccggcccagtacacggtactgcgccacgaaggcaccgagcgccccttcagcagcccactcaatgatgagcatcgcaagggcgttttctcgtgcgcgggctgccagctcgacctgttctcgtcgtcaaccaagttcgacagcggcactggttggccgagcttctgggcgccgctggccaacgcagtgggcaccaccgaggaccgcacgttcggcatggtgcgcacggcagtgcattgccgccgatgcggtggccaccttggccacgtgttcgacgacggccctaacaggctgctgaagtactag

SEQ ID NO: 76 - protein, 156 aa, Populus trichocarpa
MRITRRFLLSGGSLTATLAAVGGWRLLAAGNANAAGSGAQSFEVTLSDEAWRQKLTPAQYTVLRHEGTERPFSSPLNDEHRKGVFSCAGCQLDLFSSSTKFDSGTGWPSFWAPLANAVGTTEDRTFGMVRTAVHCRRCGGHLGHVFDDGPNRLLKY

SEQ ID NO: 77 - DNA, 468 bp, Populus trichocarpa
atgaccgccttcgacctgacgccccccactgccacccagaccgaggcgctggtcgccggcctcagcagcgaagagcgccgcgtgctgctgcagcacggcaccgaggcaccgttctgtggcgtgttcctcgacaacaagcgtgagggcgtctactgctgccggctgtgcgcgctgccgctgttccgctccagtaccaagttcgattccggcactggctggcccagcttcttcgcgccgttcgacccggcgcatgtgcgcgagatccgcgataccagccacggcatggtccgcaccgagatcacctgcgcgcgctgcggcagccacctgggccacgtgttcccggacggcccgccgccgacctacgagcgccactgcctgaactccgtctcactttcgttcaccggcaatggcgagccctggcccgatccgctgcagcgcggcggcgctgaagccggcgtggcgggctga

SEQ ID NO: 78 - protein, 155 aa, Populus trichocarpa
MTAFDLTPPTATQTEALVAGLSSEERRVLLQHGTEAPFCGVFLDNKREGVYCCRLCALPLFRSSTKFDSGTGWPSFFAPFDPAHVREIRDTSHGMVRTEITCARCGSHLGHVFPDGPPPTYERHCLNSVSLSFTGNGEPWPDPLQRGGAEAGVAG

SEQ ID NO: 79 - DNA, 789 bp, Populus trichocarpa
atgctccaaactctatccacccatctctcctccacctccacctccacctccaccaccacacctctcctcctcctctcaaaacccttcctgtctccctctgcaaaatcccagctttctcactctaaacccttcaacttccctcgaaccttaaaacccatctcttattacaagccccccatgaacatccttagcaaactaggctttggtactaggtcacctgacccatccacaatggacccaacaatcccacaaggtcctgacgatgacttaccagctcctggtcagcaatttgctcagtttggagctggttgtttttggggtgttgaattggcatttcaaagagtcccgggcgttaccaaaactgaagtgggttatactcaaggcttatcacataatccaagttatgaagatgtttgtactggtactaccaagcatagcgaagttgttagggttcagtatgaccctaaagagggtagctttgagactttgcttgatgctttttgggctagacatgatcctactaccttgaatcgccaggggaatgatgtgggaacacagtacaggtctggaatatactattacacccctgagcaggagaaggcagcaaaggaatccatggaacagcagcagaagctctcaaacaggaaaatagtcacggagattttacctgccaaaaaattctaccgagcagaagaataccaccaacagtatcttgccaaaggaggccgttttggatttaaacaatcttctgagaaaggctgcaatgatccaatcagatgctatggctaa

SEQ ID NO: 80 - protein, 262 aa, Populus trichocarpa
MLQTLSTHLSSTSTSTSTTTPLLLLSKPFLSPSAKSQLSHSKPFNFPRTLKPISYYKPPMNILSKLGFGTRSPDPSTMDPTIPQGPDDDLPAPGQQFAQFGAGCFWGVELAFQRVPGVTKTEVGYTQGLSHNPSYEDVCTGTTKHSEVVRVQYDPKEGSFETLLDAFWARHDPTTLNRQGNDVGTQYRSGIYYYTPEQEKAAKESMEQQQKLSNRKIVTEILPAKKFYRAEEYHQQYLAKGGRFGFKQSSEKGCNDPIRCYG

SEQ ID NO: 81 - DNA, 471 bp, Populus trichocarpa
atgcaatttgactatgtagagtatgacccgaaggtgattagttacagtcaactcttggaggtattttgggctagtcatgattcaaggcaagtgtttgggcaaggtcctgatgtgggtaatcaatataggtctgttattttcactaatggaactgaagagcgtagattggctggtgttagcaaagaaagagagcagttgaagttgaggagcagtgttgtggttactcaaattcaacagcttggaacattttatcctgcagagccagaacatcagaaatttgagctcaagcagaatccatttattcgtcagctgatgggaaacttgcctgaagcggaccttgagaattcaagtttggcagcaaaattaaatggctatgcagcagagctctgccctccacgcattcaaaagcagatcaatgcaaagatcaatgacattcttagaaaaggttggcctgttctgagagatgtatag

SEQ ID NO: 82 - protein, 156 aa, Populus trichocarpa
MQFDYVEYDPKVISYSQLLEVFWASHDSRQVFGQGPDVGNQYRSVIFTNGTEERRLAGVSKEREQLKLRSSVVVTQIQQLGTFYPAEPEHQKFELKQNPFIRQLMGNLPEADLENSSLAAKLNGYAAELCPPRIQKQINAKINDILRKGWPVLRDV

SEQ ID NO: 83 - DNA, 402 bp, Populus trichocarpa
atggcaggaggaggttcggtgcagaaaaccgaggaagaatggagggctgttctctcccccgagcagtttcacatccttcgtgacaagggaacagagccgaaattcagtggagaatatgataagttttttgagcaaggagttttcaattgtgctggttgtgggacacctctttacaaatccaccaccaaattcaactctggctgtggctggcctgctttctatgaaggtcttcctgctgcgataaatcgatctccggaccctgatgggaggagaactgagatcacatgcgcagcttgtggggggcatctgggtcatgtattcaagggcgagggtcacaagactccaacagacgaacgccattgtgtcaacagcatctctatcaagtttgtttcttctcagtga

SEQ ID NO: 84 - protein, 133 aa, Populus trichocarpa
MAGGGSVQKTEEEWRAVLSPEQFHILRDKGTEPKFSGEYDKFFEQGVFNCAGCGTPLYKSTTKFNSGCGWPAFYEGLPAAINRSPDPDGRRTEITCAACGGHLGHVFKGEGHKTPTDERHCVNSISIKFVSSQ

SEQ ID NO: 85 - DNA, 444 bp, Populus trichocarpa
atgggttcttctgcttcttcttctcagaagcctgacaacactcaaggagatgttaactatgcctctgtgagcgatggagaatggaagaagaagcttacagccgaggagttttacgtcactcggcagaaggggactgagagagctttctctggagagtattggaacaccaaaaccccgggaacttaccactgcatctgttgtaatacacctctatttgaatcatccactaaatttgacagaggaactggttggccatcttactatcagcccataggaaataatgtgaagtcaaagttagacttgtcgattattttcatgcctcgtcaggaagttctctgcgcggcttgtgatgctcatctagggcatgtatttgatgatggtccaccacctactggtaaacgttattgtatcaatagcgcttccttgaaactaaatcccaaataa

SEQ ID NO: 86 - protein, 147 aa, Populus trichocarpa
MGSSASSSQKPDNTQGDVNYASVSDGEWKKKLTAEEFYVTRQKGTERAFSGEYWNTKTPGTYHCICCNTPLFESSTKFDRGTGWPSYYQPIGNNVKSKLDLSIIFMPRQEVLCAACDAHLGHVFDDGPPPTGKRYCINSASLKLNPK

SEQ ID NO: 87 - DNA, 573 bp, Populus trichocarpa
atggcaacccacaccaccaatcctgctctggatccggatctagacaaaccagacaaccccaatcacgagtttgctcaattcggagctggatgtttctggggtgtcgagcttgcctttcagagattacatggtgtggtcaaaactgaagtaggctactctcagggtaacgtccctgatccgacttacaaacttgtatgcaccaaaaccaccaaccacgttgaggttgtccgggtccaatttgaccctgaagtttgcccatataccaacctcctctctcttttctggtctcgccatgatcccaccaccctcaatcgtcagggtggcgatgtgggtacacagtatagatcagggatatactactacaacgaggctcaagctaagttagcccaggaatcgaaggaagctaaacagttgggattgaaggataacacggttgtgacggaaatcctgccagcaaagagattttatagagctgaggagtaccatcagaagtatctggaaaaaggtgggggtcgaagcgctaaacagtctgctgaaaaaggttgcaatgaccctattagatgctatggttaa

SEQ ID NO: 88 - protein, 190 aa, Populus trichocarpa
MATHTTNPALDPDLDKPDNPNHEFAQFGAGCFWGVELAFQRLHGVVKTEVGYSQGNVPDPTYKLVCTKTTNHVEVVRVQFDPEVCPYTNLLSLFWSRHDPTTLNRQGGDVGTQYRSGIYYYNEAQAKLAQESKEAKQLGLKDNTVVTEILPAKRFYRAEEYHQKYLEKGGGRSAKQSAEKGCNDPIRCYG

SEQ ID NO: 89 - DNA, 573 bp, Populus trichocarpa
atggcaaccagcaccaccaatcctgctctggatccggatctagaccagccagacaacccgaatcacgagttcgctcaattcggagctggatgtttctggggggttgagcttgcctttcagagactgcctggtgtggtcaaaactgaagtgggctactctcagggtcacgtccctgacccaacttacaagctggtatgcaccaacaccaccaaccacgttgaagttgttcgtgtccaatttgacccggaagtttgcccatataccaacctcctctctcttttctggtctcgacatgatcctaccaccctcaatcgccagggtggtgatgttggtacacagtatagatcagggatttactactacaatgaggcccaagctaagttagcccaggaatcaaaggaagctaagcagttggaattgaaggatagcaaggttgtgacagaaattctgccagcaaagagatttttcagagctgaagagtaccatcagcagtatctggagaaaggtggaggtcaaggtgttaaacagtctgctgaaaaaggttgcaatgaccctattagatgctatggttaa

SEQ ID NO: 90 - protein, 190 aa, Populus trichocarpa
MATSTTNPALDPDLDQPDNPNHEFAQFGAGCFWGVELAFQRLPGVVKTEVGYSQGHVPDPTYKLVCTNTTNHVEVVRVQFDPEVCPYTNLLSLFWSRHDPTTLNRQGGDVGTQYRSGIYYYNEAQAKLAQESKEAKQLELKDSKVVTEILPAKRFFRAEEYHQQYLEKGGGQGVKQSAEKGCNDPIRCYG

SEQ ID NO: 91 - DNA, 795 bp, Populus trichocarpa
atgctccgaaatcttgctacccacttctcctctacctcctccaccaccaccagcagcagcaccacccctcttctcgtcctctcaaaacctttccgttctctctcatcaaaatcgctactttttctctctaaacccttcaatttccctcgaacctcaaaacccatctcttattacaagccatcaatgaacatccttaacaaactaggctttggtcccaggtcacctgacccatcaacaatggacccaacaatcccacaaggtcccgatgatgacttaccagctcctggtcagcaatttgctcagtttggagctggttgtttttggggtgttgaattagcatttcaaagagtccctggtgttactaaaactgaagtgggttatactcagggcttattgcataatccaacttatgaggatgtttgttccggcactactaatcataatgaagttgttagggttcagtatgaccctaaagagtgtagctttgacactttgcttgatgttttgtgggctagacatgaccctactgccttgaatcgccaggggaatgatgtgggaacacagtacaggtctggaatatactattacacccctgagcaggagaaagcagcgaaggagtccttggaacggcagcagaagctcttgaacaggaagatagtcactgagattttacctgccaaaaaattctacagagcagaagaataccaccagcagtatcttgcgaagggtggccgatttggatttatgcaatctgctgagaaaggatgcaatgatccaatcaaatgctatggctaa

SEQ ID NO: 92 - protein, 264 aa, Populus trichocarpa
MLRNLATHFSSTSSTTTSSSTTPLLVLSKPFRSLSSKSLLFLSKPFNFPRTSKPISYYKPSMNILNKLGFGPRSPDPSTMDPTIPQGPDDDLPAPGQQFAQFGAGCFWGVELAFQRVPGVTKTEVGYTQGLLHNPTYEDVCSGTTNHNEVVRVQYDPKECSFDTLLDVLWARHDPTALNRQGNDVGTQYRSGIYYYTPEQEKAAKESLERQQKLLNRKIVTEILPAKKFYRAEEYHQQYLAKGGRFGFMQSAEKGCNDPIKCYG

SEQ ID NO: 93 - DNA, 546 bp, Triticum aestivum
atgtcgagcaccggcgcggcgggcccggacgccgacgcggcggtcggtgaggggctggagctggcgcagttcggggcgggctgcttctggagcgtggagctggcgtaccagcggctccccggcgtggcgcgcacggaggtgggctactcgcaggggcacctcgacgggccgacctaccgcgacgtctgcggcggcggcaccggccacgccgaggtcgtgcgcgtgcactacgaccccaaggagtgcccctacgccgtgctcctcgacgtcttttgggccaagcacaaccccaccacgctcaacaagcagggcaacgacgtcgggacgcagtaccggtcgggcatctactactacacggcggagcaggagcggcaggcgcgggagtcgctggcggagaagcagcgggagtggaaggagaagatcgtgacggaggtcctcccggcgcggaggttctacccggccgaggactaccaccagcagtacctcgagaagggcggccagtccgccaagaagcgctgctccgaccccatccgctgctacggctga

SEQ ID NO: 94 - protein, 181 aa, Triticum aestivum
MSSTGAAGPDADAAVGEGLELAQFGAGCFWSVELAYQRLPGVARTEVGYSQGHLDGPTYRDVCGGGTGHAEVVRVHYDPKECPYAVLLDVFWAKHNPTTLNKQGNDVGTQYRSGIYYYTAEQERQARESLAEKQREWKEKIVTEVLPARRFYPAEDYHQQYLEKGGQSAKKRCSDPIRCYG

SEQ ID NO: 95 - DNA, 657 bp, Triticum aestivum
atgtcgagcaccggcgcgtcgggcccggacgccgacgcggcggccggcgaggggctggagctggcgcagttcggggcgggctgcttctggagcgtggagctggcgtaccagcggctccccggcgtggcgcgcaccgaggtgggctactcgcaggggcacctcgacgggcccacctaccgcgacgtgtgcggcggcggcaccggccacgccgaggtggtgcgcgtgcactacgaccccaaggagtgcccctacgccgtgcttctcgacgtcttctgggccaagcacaaccccaccacgctcaacaagcagggcaacgacgtcgggacgcagtaccggtcgggcatctactactacacggcggagcaggagcggcaggcgcgggagtcgctggcggagaagcagcgggagtggaaggagaagatcgtgacggaggtcctcccggcgaggaggttctacgcggccgaggactaccaccagcagtacctccataagggcggccagtcccgccaagaaaggggtggtcccgaaccccaatccgggtgcttacgggttggtaaactcactggcccccgcgtcccccggaccggccctaaggcttatgggatggctggcattggccccgtcaagccctcctttaaaggggacacccgttcctaa

SEQ ID NO: 96 - protein, 218 aa, Triticum aestivum
MSSTGASGPDADAAAGEGLELAQFGAGCFWSVELAYQRLPGVARTEVGYSQGHLDGPTYRDVCGGGTGHAEVVRVHYDPKECPYAVLLDVFWAKHNPTTLNKQGNDVGTQYRSGIYYYTAEQERQARESLAEKQREWKEKIVTEVLPARRFYAAEDYHQQYLHKGGQSRQERGGPEPQSGCLRVGKLTGPRVPRTGPKAYGMAGIGPVKPSFKGDTRS

SEQ ID NO: 97 - DNA, 792 bp, Triticum aestivum
atgcctcccctcctcacctcacccgcctccctctcctcctcccccctccgcctcgcctcccgcctcgtcggcgccgccctccgtcccaccccctcctcctcgtcccgcagccgtcgtttcctcgcccccacccaaaccgcggcgccgggaaccaccaccagcggcgggttcgcggcgatgagctggctcgggaagctggggctgggcggcgggggaagcccgcgcgcgtcggaggcgtccgcggcgctggcgcaggggcccgacgaggacaagccggcgcccgggagcgagttcgcgcagttcggggccggctgcttctggggcgtggagctggtgttccagcgcgtgcccggggtcacccgcaccgaggtcggctacagccagggcgccttccacgaccccacctacgaggacgtctgcaccggcgccaccggccacaacgaggtcgttcgcgtccagtacgaccccgccgcctgcaagtacgacgacctcctcgaaaccttctgggcgcgccacgacccgaccacgcccaatcgccaggggggcgacgtcggaacccagtacaggtcagggatctactactacacatcagagcaggagaaggcggcgctcgagtctatggagaagcagcagaaggttcagaaccggaagatagtcactgagatcctccccgcgaagaggttctacaaggcggaggagtaccaccagcagtaccttgcgaagggcggtcgctttggcttcaaacagtccacggagaagggctgcaacgaccccatccgctgctacggatga

SEQ ID NO: 98 - protein, 263 aa, Triticum aestivum
MPPLLTSPASLSSSPLRLASRLVGAALRPTPSSSSRSRRFLAPTQTAAPGTTTSGGFAAMSWLGKLGLGGGGSPRASEASAALAQGPDEDKPAPGSEFAQFGAGCFWGVELVFQRVPGVTRTEVGYSQGAFHDPTYEDVCTGATGHNEVVRVQYDPAACKYDDLLETFWARHDPTTPNRQGGDVGTQYRSGIYYYTSEQEKAALESMEKQQKVQNRKIVTEILPAKRFYKAEEYHQQYLAKGGRFGFKQSTEKGCNDPIRCYG

SEQ ID NO: 99 - DNA, 777 bp, Zea mays
atggcagccccctccgcggccgtcataggggtgctcgtcctcctcgtcgtgggggcctcgggcgcgcgcctcccaggccgcggcagcaccacccggggagctgcgctgccgcgcgggggagcgccggccacggcggtgttcgcgctgggaagcttctggcggtcggaggcggcgttcgggtgcctccacggcgtgatccgcacctccgtcggctacgctggcggctccaagtccaaccccgagtaccgcaacctcgccgaccacgccgagtgcgtcaaggttgagtatgatccccggttgattcactacaggcaacttttggatgtgttctgggcaagtcatgacccacgtgaggtgtttgggcaagggccagatgttggcaaccagtatagatctgtcatcttcactaatggaaccatcgaggccagattggctggtcttagcaaagaaaaagaacaagctaaagaccgtagcagcgttgttaccacacagatccaaccattgggggtctttcatcatgctgaaccagaacatcagaaatttgaactgaagcgtaaaccgttcctcttgcaattgattgggaatttgccggaggaggagctcctgacatcaacactagctgcaaaactgaatgcatatgccgctgagctctgccctgcgaatacccaaaagagaattaactccaagattgatgaagtcacaaagaaaggatggcccattttaagggacatttaactctttctagcttttggactcaaaccgatcgatgcaatgtag

SEQ ID NO: 100 - protein, 244 aa, Zea mays
MAAPSAAVIGVLVLLVVGASGARLPGRGSTTRGAALPRGGAPATAVFALGSFWRSEAAFGCLHGVIRTSVGYAGGSKSNPEYRNLADHAECVKVEYDPRLIHYRQLLDVFWASHDPREVFGQGPDVGNQYRSVIFTNGTIEARLAGLSKEKEQAKDRSSVVTTQIQPLGVFHHAEPEHQKFELKRKPFLLQLIGNLPEEELLTSTLAAKLNAYAAELCPANTQKRINSKIDEVTKKGWPILRDI

SEQ ID NO: 101 - DNA, 653 bp, Medicago truncatula
agttcgagcctatcagctgctgcacaaattcttcccaatacccaaattcagaaatttgattccaaacttttgttgtggccatcacgtttgcatactaaacccacaacaaaactttcttcttcaattcgggcaatgggctcttcagcttcttctaactccaacaacccaaacaccacagaaattcaatcaggatctagtcctgttgattataaatctttaagtgatgcagaatggaagaagcagctaaccgatgaacaattttatgttactcggaaaaagggaactgagagagctttcaccggggagtactggaataccaaaactgaagggacttaccattgcatatgttgtgacacacccttatttgaatcatctaccaagtttaatagtggaactggttggccatcttattaccagccaattggtaaaaatgtgaaatcaaagctagatttgtcaattatattcatgcctcgccaagaagttctctgtgctgtttgtgatgctcatctcggacacatttttgatgatggccctccacccacaggaaagcgttactgtatcaacagtgcttcccttaaactcaaaccaaggaagtaagatgatcaaatacttgtcactcaaatgtagatggtttaatattcaaatggtaactg

SEQ ID NO: 102 - protein, 154 aa, Medicago truncatula
MGSSASSNSNNPNTTEIQSGSSPVDYKSLSDAEWKKQLTDEQFYVTRKKGTERAFTGEYWNTKTEGTYHCICCDTPLFESSTKFNSGTGWPSYYQPIGKNVKSKLDLSIIFMPRQEVLCAVCDAHLGHIFDDGPPPTGKRYCINSASLKLKPRK

SEQ ID NO: 103 - DNA, 898 bp, Arabidopsis thaliana
actcacaaaattaattcttcttctcttttcttttcttaaaagagctcaaaacacacgaccatctttccgctgtcttcttagcttcttatctaccgtaatcatgccaacatcagcaacagcggtggctccatcaactggatctgtccagaaaaaagatcaagactggcgtgcgattttgtctcccgagcaatttagagttctcagggaaaagggcacagagaaccgaggtaaaggagagtataccaaactgttcgacgacggaatctatagttgtgctggttgtgcaactcctctttataagtccaccactaagttcgactctggttgtggctggccttccttcttcgatgctatccctggtgccattaaacaaacggtaattgacatattctttttcttttcttttatgacacacaattattttagtgataaagattgttgtattaaacaagttttatgtttataaaatatctctatcagcccgaggcaggagggagaagaatggagatcacgtgcgcggcatgtgacggacatttaggtcatgttgtcaaaggagaaggttttcccacagcgaccgatgagcgccactgcgtcaacagtgtttctctcaagttctctgaaatttcctcccaataagtctatatagtccacattgatgaccactattgttggaccaagtcctctccttcaagaaaatttgaaaatcaagtcggattgtttgagattgtcatgttatgttccattcctagtcttgtgtgatatgctcgctccagtgattgttgtttgtcccttgtatggatatctttttaataattatattattgttatctttccattgacccttgatatgttcaatgcaagtcctatataataaaaattggcatttgttttctcattt

SEQ ID NO: 104 - protein, 121 aa, Arabidopsis thaliana
MPTSATAVAPSTGSVQKKDQDWRAILSPEQFRVLREKGTENRGKGEYTKLFDDGIYSCAGCATPLYKSTTKFDSGCGWPSFFDAIPGAIKQTVIDIFFFFSFMTHNYFSDKDCCIKQVLCL

SEQ ID NO: 105 - DNA, 893 bp, Arabidopsis thaliana
gagagtcagaaaaagctgttgtcaagagaagaaggaagagaggagataaaaagccaaacaaatggcgttcaatatcataacacctggtcgtgtttattcagccacgtctctcactttcgtttccaccattaaagctgctttcgttaaacctcctttggcctctccgtctcgtcgtaacctccttcgtttctcatcatctcctttgtcatttccgtcgctccgtcgaggtttccacggtggtcgtattgtggcaatgggttcttctgctcctgaatcggtcaataagccggaagaagagtggcgtgcgattctttctcctgaacaatttaggattctcagacagaaaggcactgaatatccaggaactggagaatacaacaaagtattcgacgatggcatctattgttgtgcaggatgtggaactcctctctacaaatccaccaccaaattcgactctggttgtggctggccagctttctttgatggactccccggagctataacccgaaccatgggagacgaatcgagatcacatgtgctgcttgtggaggacatcttggtcacgtttttaaaggagaaggtttccctactcctaccgatgagcgacactgtgtaaacagtatctctctcaagttcacaccagagaatccgaccctgtaataatatgatcacagaaaaaaagacgtgataatataggtgtgttgtgtgatgcttctgtctctctctcgtactgtgtttttgtcttttttctgtgagactaatgtttacttttgatggttaataataaggtcgttgaataaagtctccagactttttgtatcgtcatggcagatttttctcaggctggtaaagttaatagtgttactagtttgcagagaaaaataaaatgattt

SEQ ID NO: 106 - protein, 184 aa, Arabidopsis thaliana
MAFNIITPGRVYSATSLTFVSTIKAAFVKPPLASPSRRNLLRFSSSPLSFPSLRRGFHGGRIVAMGSSAPESVNKPEEEWRAILSPEQFRILRQKGTEYPGTGEYNKVFDDGIYCCAGCGTPLYKSTTKFDSGCGWPAFFDGLPGAITRTMGDESRSHVLLVEDILVTFLKEKVSLLLPMSDTV

SEQ ID NO: 107 - DNA, 773 bp, Brassica napus
atcatcatcttcagccaccaccatcagagccttcgttagaccttctctctccctcagaatcactcgtttcgcgaatcctaacctccttcctctctccgcctctccttcctcatttcctccgctccgtcttcttagccgaggcttccacggtggtcgtatcacagcaatgtcttctcctgctcccggatcggtcaacaagccagaggaagagtggcgtgcgatcctgtctcctgagcaattcaggatcctgaggcagaaaggcaccgaatatccaggaacaggagaatacaacaaactattcgaagacggcatctattcttgtgcaggatgtgggactcctctttacaaatccgccaccaaattcgactccggttgtggctggcctgctttctttgacggccttcccggtgctataaaccgaactcctgatccagatgggagaagaatcgagatcacttgtgcggcttgtgggggacatctcggccatgttttcaaaggagaaggtttccctacacctaccgatgagcgacactgtgtgaatagtatctctctcaagttcgcaccagggaatcaagacttgtaataatgtactttgtgttgtgtaatgcttctgtctatttcttgtgtgtcttgctcgttgtaaccagtgttcagttccactaatgtcgttcaatcaaaagtcttgagactcttggtattgtcataatcatacataagattttacacaaaccggcgaataaagtaacttcacttcgaaaaaaaaaaaaaaaaaa

SEQ ID NO: 108 - protein, 138 aa, Brassica napus
MSSPAPGSVNKPEEEWRAILSPEQFRILRQKGTEYPGTGEYNKLFEDGIYSCAGCGTPLYKSATKFDSGCGWPAFFDGLPGAINRTPDPDGRRIEITCAACGGHLGHVFKGEGFPTPTDERHCVNSISLKFAPGNQDL

SEQ ID NO: 109 - DNA, 840 bp, Brassica napus
ggtcgacgattccgtagaagacatcagaacacacgaccatctctctgtcgccttaaaagcctcttcttaccatggcaacgacagcaacatcggcggctccatcacctggatctgttcagaaacacgatgaggagtggcgtgcggttctgtctcctgaacaatttagagttctcaggaaaaagggaacagaagcccgattcaaaggagaatatacaaaactgttcgaggaaggaacctatgcgtgtgctggctgtgcgactcctctttataagtccaccaccaagttcgactctggttgtggctggcctgccttcttcgacgctattcctggtgccattatacaaactctggagccagatgggaagagagttgagatcacatgcgcaaaatgtgatggacatttaggtcatgttttcaaaggagaaggattccccacggctaccgatgagcgtcactgcgtcaacagtgtttctcttaagtttaattcttccgaaacttcctcctgataaatcgatatatatccatttattgtttggaccaattcttctcctacaagagaataaaaaaattgagtctagtcgtttaacgaacaacttatgcaagatggaacaaaaaatgtgggattagaaagtcatagcttcaggtataaatattgatgaattcagatgatccgagcaagaagaaagagcaactaagggaacccaagagagcagcgtagagaagttaattagtgtaatttatcgtgtgttgagattcaagtcttgttcttaggtttttttactctagtttctgtattgtacctaaacacaagagtgaccaagttaaagtttgtgtaatcct

SEQ ID NO: 110 - protein, 144 aa, Brassica napus
MATTATSAAPSPGSVQKHDEEWRAVLSPEQFRVLRKKGTEARFKGEYTKLFEEGTYACAGCATPLYKSTTKFDSGCGWPAFFDAIPGAIIQTLEPDGKRVEITCAKCDGHLGHVFKGEGFPTATDERHCVNSVSLKFNSSETSS

SEQ ID NO: 111 - DNA, 886 bp, Brassica napus
gatggcgttgaacgtgatacagtcatctgtgcgtgtatcttcagccacttctttgaccttctcttccgccatcaaatccttcgtcacaccttccctccccctcgcaacccatcgattctctctttctccctcgccgaatctcaacctccttcgcatcccctcctctccaccgtccttctcatcgctccgccgaggttttcgcggtggtcgtataacagcaatggcttcttctgctcccggatcggtcaacaagccagaggaagagtggcgtgcggttctctctcccgagcaattcagaatcctcaggcagaaaggcactgaatatccagggacaggggagtacaacaaagtattcgcagacgggatctatagctgtgcaggatgtgaaactcctctatacaaatccgccaccaagttcgactctggctgtggctggcctgctttctttgacggcatccccggcgccataaaccgaaccgcggatccagatgggagaagaatagagatcacgtgtgcagcgtgtggaggacatctggggcatgttttcaaaggagaaggtttccctactcctaccgatgagcgacattgtgtcaacagtgtctccctcaagttcgcacccgggaacgcagccttgtaataataatctacttgtattgtgcgtcaaaaaaaagatagtgtgtgttgcttatttgtgtcccacccgctggctcgcactgtgtttcgatgtgactgctagtagtaataaggtggttgaattaacgtaaaaaaaaaaaaaaaaaaaaaaaaaaaaaaaaaaaaaaaaaaaaaaaatcggggcccttttataaaacacatttttatgcccggcgggcggagataatatttttttttatgggggcccaaaaat

SEQ ID NO: 112 - protein, 211 aa, Brassica napus
MALNVIQSSVRVSSATSLTFSSAIKSFVTPSLPLATHRFSLSPSPNLNLLRIPSSPPSFSSLRRGFRGGRITAMASSAPGSVNKPEEEWRAVLSPEQFRILRQKGTEYPGTGEYNKVFADGIYSCAGCETPLYKSATKFDSGCGWPAFFDGIPGAINRTADPDGRRIEITCAACGGHLGHVFKGEGFPTPTDERHCVNSVSLKFAPGNAAL

SEQ ID NO: 113 - DNA, 867 bp, Brassica napus
tcgacgattccgtccttctgtaacatcctccatttcgtggatgtcatagaagaagacttcaaaatcgaaacagtattcaaagaaagatggcttcttctagttgtttcaccattcaatcaagcttcttctcagcgagtacaaggctcgattcaatctccaaaccgagtctctccggattcgcttgtcgttctcttacaaaacccagaaacttgaatctctctgttcttcttcgttgttccatgggttcctttaactcttctcagaaatcagacaacgtccaagaagctgcaaagagtgactttgcttcaataagtgaaggtgagtggaagaaacggcttacaccggaacagtattacatcactagacagaaggggacagagagagctttcactggtgagtattggaatacaaagaccccaggagtatacaaatgtatctgttgcgacacgccactgtttgactcatcaacaaagtttgatagtggaaccgggtggccatcgtattaccaacctattggaaacaatgtgaagtcaaagctggacctctctatcatcttcatgcctagacaagaagttatctgtgctgtttgtaacgcccatcttggtcatgtcttcgatgacggtccacgaccaaccggaaaacgatattgcctcaacagtgctgctctgaaacttgagtcattggagagaacaagagaatgagagtttctggtacaaaggattattcatgtattatataatatagtttcgttttactatggtcctccttgtattgatgaaaacattgtaatcacatgtaataaatacacaggagaacagaacagttataagctttttgagttgactccacaaaaaaaaaaaaaaaaaa

SEQ ID NO: 114 - protein, 204 aa, Brassica napus
MASSSCFTIQSSFFSASTRLDSISKPSLSGFACRSLTKPRNLNLSVLLRCSMGSFNSSQKSDNVQEAAKSDFASISEGEWKKRLTPEQYYITRQKGTERAFTGEYWNTKTPGVYKCICCDTPLFDSSTKFDSGTGWPSYYQPIGNNVKSKLDLSIIFMPRQEVICAVCNAHLGHVFDDGPRPTGKRYCLNSAALKLESLERTRE

SEQ ID NO: 115 - DNA, 649 bp, Brassica napus
tgatcaagaacctagaagaacaatatcattatctgattcggttcctccgtcgtaatatctcagcttcaggttatcttaagtggcggtgatggcggcagctcatggacgggtggttcagaaaacagaggaggagtggcgtgcgatcctttctcctgagcagtttaggatcctccgacaaaaaggcactgaaataccaggaaccggagaatatgacaaattcttcgaggatggaattttcagctgtgtcggatgcaaaactcctctctataaatctactacaaagtttgactccggatgtggttggccagctttctttgaaggactccctggtgccattaaccgagcgcctgatccagatgggaggagtacagagatcacttgtgcagtatgcgacgggcatttaggccatgttacaaaaggagaaggttatgatactcctaccgatgaacgccactgcgttaacagcgtctcgatcatcttcaacccgcaaaaaccacctgaggaggctgaggattgatcataaaatatagtcaatcagattgactgtgttgtttaataaattctccggtttgctcatcaagtgaaagaaatcagaaataataatgttgaatcatctttgtcaaaagaagaataataataacagggatca

SEQ ID NO: 116 - protein, 142 aa, Brassica napus
MAAAHGRVVQKTEEEWRAILSPEQFRILRQKGTEIPGTGEYDKFFEDGIFSCVGCKTPLYKSTTKFDSGCGWPAFFEGLPGAINRAPDPDGRSTEITCAVCDGHLGHVTKGEGYDTPTDERHCVNSVSIIFNPQKPPEEAED

SEQ ID NO: 117 - DNA, 720 bp, Glycine max
  misc_feature (676)..(676): n is a, c, g, or t
tgattcgtgaacacaaacaccatcgccatgggcttcaatattctgagaaccacttccatctccactcctatctcttcctccaaatccaaacccattttctcaactcttcttcgttcttctccttccaccattttccccccaaagtccgttactcccaccactcttttcgtttctgccacccccttcttcactctccatcccaagcttggttttcgtggtgggattgtggccatggccgcacctggctctctccgcaaatccgaggaagagtggcgcgcaattctctcccctgaacagtttcggatcctcaggcaaaagggcaccgagttccctggaacaggagagtatgacaagttctatgaagagggagtttacaactgtgctggttgtgggactccactctacaggtccataacaaaattcaattctggttgtggctggccagccttctatgaggggattcccggagccataaatcgcaatccggatcctgatgggatgaggacagaaataacgtgtgctgcttgtgggggacatctaggtcacgtctttaaaggagaaggatttccaacacccactaacgaacgccattgtgtcaatagcatttcgctgaaatttgcgccagccaattcttattcttaataaaattgagtctgctggttgacgtgactacttnagtacccaacatcggtaaaaaaattatgcaatgtacttatatta

SEQ ID NO: 118 - protein, 204 aa, Glycine max
MGFNILRTTSISTPISSSKSKPIFSTLLRSSPSTIFPPKSVTPTTLFVSATPFFTLHPKLGFRGGIVAMAAPGSLRKSEEEWRAILSPEQFRILRQKGTEFPGTGEYDKFYEEGVYNCAGCGTPLYRSITKFNSGCGWPAFYEGIPGAINRNPDPDGMRTEITCAACGGHLGHVFKGEGFPTPTNERHCVNSISLKFAPANSYS

SEQ ID NO: 119 - DNA, 1348 bp, Glycine max
ccggctggacgatgtcgttttctcttcaatactactctcaactcattcttctctctcaaaaaccattagaaacgaaaataaccaaataagaagaaagaaacaatgaacgacttgttctccggttccttctcccgcttccgcagcgaccagtcctccccggaccgccaccacgacatcgagatgggcgccaccgcctccagcggcggtcgcggcggcgaggtgaaccttgacaagttcttcgaggacgtggaaggcgtgaaggaggaactaaaggagttggaaggtttggctcagagtctaaggagcagccacgagcagagcaagacgctgcacaacgcgaaggcggtgagggacctgcgcgcgggcatggacggcgacgtctcggcggcgctgaagaaggcgaagctgatcaagctcaagctcgaggcgctggagcggtccaatgccgcgaaccgtaacttgcctggatgtggaccgggttcgtcctcggaccggacccggacctccgtggtcaacggtttgaagaagaagctgaaggattcgatggagagtttcaacgagattcgcgggcttgtttcgtcggagtaccgcgagaccgtgcagcggcggtacttcaccgtcaccggcgagaatcccgatgataagacgctcgatctcttgatctccaccgtgtggagcatctgggaaaaaatggcagcaccaacgccgattcacaaaactgaagaggaatggaaggtcattctctcccccgagcagtttcggatccttcgccagaaaggaactgaattgaagggtacaggagaatataacaagttttttgaagaaggaatttacaactgtgctggctgtgggactcctctttacaagtcttcaaccaagtttgattctggttgtggttggcctgctttctttgagggttttcccggcgccatcaatcgaacccctgacccagatgggaggaggactgagataacctgtgcagcctgtggtgggcacttgggtcatgttttcaaaggagagggattcaagaccccaactgatgaacgccattgcgtcaatagtatttctgtcaaatttgttccgggaagtgctactttttcaatatgaaaccttacttgctctattggaggtgtctattgaaagattgtcttgtttgtggtcttttacagacagctagctagctagctctcaagaataaaatcgttttcttgtttaaaaaaaaaaaaaaaaaagaaaaaaagaaaaaaaaaaaaaaaaaaaaaaaaaaagagagagaagagaaaaaaaaaaggagaggaaaaaaaaaaaaaaaaaacttgaaggggggcccgcagcccaattgcccctt

SEQ ID NO: 120 - protein, 334 aa, Glycine max
MNDLFSGSFSRFRSDQSSPDRHHDIEMGATASSGGRGGEVNLDKFFEDVEGVKEELKELEGLAQSLRSSHEQSKTLHNAKAVRDLRAGMDGDVSAALKKAKLIKLKLEALERSNAANRNLPGCGPGSSSDRTRTSVVNGLKKKLKDSMESFNEIRGLVSSEYRETVQRRYFTVTGENPDDKTLDLLISTVWSIWEKMAAPTPIHKTEEEWKVILSPEQFRILRQKGTELKGTGEYNKFFEEGIYNCAGCGTPLYKSSTKFDSGCGWPAFFEGFPGAINRTPDPDGRRTEITCAACGGHLGHVFKGEGFKTPTDERHCVNSISVKFVPGSATFSI

SEQ ID NO: 121 - DNA, 774 bp, Glycine max
gcacgagacacaatacagggcagcatcgccatgggattgagtattctgagaagcacttccatttccactcctatctcttcctccaaatccaaacccattttctcaactcttgttcgttcatctttcgcctccatttcccccacaaagtgtgttactcccaccactcttttcgtttctgccacccccttcttcaccgcctcacccaagcgcggctttcgtggtgggattgtggccatggccgccgctggctcgctccgcaaatcagaggaagagtggcgcgcagttctctcccctgaacagtttcgtattctcaggcaaaagggcaccgagttccctggaacaggagagtatgacaagttctttgatgagggagtttacaactgtgctggttgtgggacacctctctacaggtccttaacaaaattcaattctggttgtggctggccagccttctatgaggggattcctggagccataaatcgcaatccggaccctgatgggatgaggacagaaataacgtgtgctgcttgtgggggacatctaggtcacgtctttaaaggagaaggatttccaacgcccactaacgaacgccattgtgtcaatagcatttcactgaaatttgcgccagccaattcttaataaaaattgagtctgctgttcggacgtgactgcttaagtacccaacattagtaaaaaaaaattatgcaatgtacttatattatgaatgaagttcatataatgatggctaaataccaattttaattaaagagttat

SEQ ID NO: 122 - protein, 202 aa, Glycine max
MGLSILRSTSISTPISSSKSKPIFSTLVRSSFASISPTKCVTPTTLFVSATPFFTASPKRGFRGGIVAMAAAGSLRKSEEEWRAVLSPEQFRILRQKGTEFPGTGEYDKFFDEGVYNCAGCGTPLYRSLTKFNSGCGWPAFYEGIPGAINRNPDPDGMRTEITCAACGGHLGHVFKGEGFPTPTNERHCVNSISLKFAPANS

SEQ ID NO: 123 - DNA, 799 bp, Glycine max
cacgagatggcttctcaaagtttgagtttaccaccaacacatattccttacaataggataattgggaagcttgattccaagtttttgttgtggccttcttgtgctcatatcaaacccagaagaatttctacctcaattcgggcaatgggttcctccgcttcttcccactcccagtcacaatatgcagacagcgttgaatctgaagcaggagctgatactattgactataaatctttaaccgatgaagagtggaagaagcggctcacaaatgaacagttctatattactcgtcagaagggaactgaaagagctttcactggggagtactggaatactaaaaccccggggatttaccattgcatatgttgcgacacacctttattcgaatcatctactaagttcaatagtggaactgggtggccatcctattaccagacaattgggaaaaatgtgaaatcaaagttggatttgtcaattattttcatgccgcgccaggaggttctctgtgctgtttgtgatgctcatcttggacatgtgtttgacgatggtcctccacccacgggaaaacgtttctgtatcaatagtgctgcccttaagctcaaaccaaagcagtagacagtgaaatacctacctatcactcggaagcagatggtataatattttaaatatgtgatatactttgggctgtttttcctatttatggagaaccacaatgaatattgtcctgaactgttgatgtataaaacccaaattttataaaatttagaagctccattttaaaaaaaaaaaagaaaaaaaa

SEQ ID NO: 124 - protein, 202 aa, Glycine max
MASQSLSLPPTHIPYNRIIGKLDSKFLLWPSCAHIKPRRISTSIRAMGSSASSHSQSQYADSVESEAGADTIDYKSLTDEEWKKRLTNEQFYITRQKGTERAFTGEYWNTKTPGIYHCICCDTPLFESSTKFNSGTGWPSYYQTIGKNVKSKLDLSIIFMPRQEVLCAVCDAHLGHVFDDGPPPTGKRFCINSAALKLKPKQ

SEQ ID NO: 125 - DNA, 629 bp, Glycine max
  misc_feature (629)..(629): n is a, c, g, or t
gccattttctcaactcttgttcgttcatctttcgcctccatttcccccacaaagtgtgttactcccaccactcttttcgtttctgccacccccttcttcaccgcctcacccaagctcggctttcgtggtgggattgtggccatggccgccgctggctcgctccgcaaatcaaaggaagagtggcgcgcagttctctcccctgaacagtttcgtattctcaggcaaaagggcaccgagttccctggaacaggagagtatgacaagttctttgatgagggagtttacaactgtgctggttgtgggacacctctctacaggtccttaacaaaattcaattctggttgtggctggccagccttctatgaggggattcctggagccataaatcgcaatccggaccctgatgggatgaggacagaaataacgtgtgctgctagtggaggacatctatgtcacgtctttatagtgagaggattctcacgcccactaacgaacgccattgtgttatagcatttcactgaaatgtgcgctatccagtgctaaataaaaattgagactgctgttcggacgtaactgtttggagtctctatcttactctgcaaacacatttgcgcggtcctctattttcn

SEQ ID NO: 126 - protein, 122 aa, Glycine max
MAAAGSLRKSKEEWRAVLSPEQFRILRQKGTEFPGTGEYDKFFDEGVYNCAGCGTPLYRSLTKFNSGCGWPAFYEGIPGAINRNPDPDGMRTEITCAASGGHLCHVFIVRGFSRPLTNAIVL

SEQ ID NO: 127 - DNA, 792 bp, Hordeum vulgare
  misc_feature (633)..(633): n is a, c, g, or t
  misc_feature (655)..(655): n is a, c, g, or t
gctaccttggtctcgtcccgagcgcacctgtcctcctacctcccgcccctcctcccctccgcgcgaccccgatccacgacaacccgcagctgcggcggcagcagttacaggcggaccgccgttcgcgccatgggcgccgcgccgtcgtcgccctcgccgtccggacaagccccagggaaagtggataacgcatctctgagtgatgaggagttgaagaagcgcctcacaaaagaacagtattatgtcactcggcagaagggaactgagagggcattcacaggggaatactggaacactaaaaccccaggcgtctaccactgcatctgctgtgacacccctctgttggagtcatctaccaagtttgatagtggtactggatggccgtcctattatcagccggttggcgacaatgtgaaaagcaagcttgatatgtcaatcttcttcatgcctcggaccgagtccctgtgcgctgtctgcgacgctcatctcgggcatgttttcgacgacgggccaccgccgacgggaaagagatattgcatcaacagcgcttctcttaagtttaagccccagtagtcccctggaggaagaatcaagatgaaagcaccagccgcgccggcatgcaaaattttcggntttgggtattgaactatttttnccagtgtagagtctggtagtaaacctagttcccggcccggttttggcacatggtaaaacctgggatatttttttcaagggttggtaaaagccccttttgtccccaaaacaattttgggatggttccttcccaaaaaa

SEQ ID NO: 128 - protein, 147 aa, Hordeum vulgare
MGAAPSSPSPSGQAPGKVDNASLSDEELKKRLTKEQYYVTRQKGTERAFTGEYWNTKTPGVYHCICCDTPLLESSTKFDSGTGWPSYYQPVGDNVKSKLDMSIFFMPRTESLCAVCDAHLGHVFDDGPPPTGKRYCINSASLKFKPQ

SEQ ID NO: 129 - DNA, 729 bp, Hordeum vulgare
  misc_feature (702)..(702): n is a, c, g, or t
  misc_feature (709)..(709): n is a, c, g, or t
gtttcccagcgtccgcgccgcaaaagaagaacactactactacgaccatcgatggccgtccggtgtcacgctgctgctaccttggtctcgtcccgagcgcacctgtcctcctacctcccgcccctcctcccctccgcgcgaccccgatccacgacaacccgcagctgcggcggcagcagttacaggcggaccgccgttcgcgccatgggcgccgcgccgtcgtcgccctcgccgtccggacaagccccagggaaagtggataacgcatctctgagtgatgaggagttgaagaagcgcctcacaaaagaacagtattatgtcactcggcagaagggaactgagagggcattcacaggggaatactggaacactaaaaccccaggcgtctaccactgcatctgctgtgacacccctctgtttgagtcatctaccaagtttgatagtggtactggatggccgtcctattatcagccggttggcgacaatgtgaaaagcaagcttgatatgtcaatcttcttcatgcctcggaccgagtccctgtgcgctgtctgcgacgctcatctcgggcatgttttcgacgacgggcctccgccgacgggaaagagatattgcatgcaacagcgcttctctgaagtttaagccccagtagtccctggaagaagaatcaagatgaaaagcaccagcgcgccgcatgcaattttncgttttnggtatgaactatttccaggg

SEQ ID NO: 130 - protein, 195 aa, Hordeum vulgare
MAVRCHAAATLVSSRAHLSSYLPPLLPSARPRSTTTRSCGGSSYRRTAVRAMGAAPSSPSPSGQAPGKVDNASLSDEELKKRLTKEQYYVTRQKGTERAFTGEYWNTKTPGVYHCICCDTPLFESSTKFDSGTGWPSYYQPVGDNVKSKLDMSIFFMPRTESLCAVCDAHLGHVFDDGPPPTGKRYCMQQRFSEV

SEQ ID NO: 131 - DNA, 860 bp, Medicago truncatula
tgaacacaagatgatggtgaatatcctaaggataacacctctttcttctttcaacgtcaccaaacccatttcctcaattcgttctaaccctacctttctcttcaactctctccctaccatttccattcgtcaaccgaagcgtggttttcgcggtggaattgttgccatgtctgctgcacctactcctggctcggtccagaaatcggaggaagaatggcaagctattctctcccccgagcagtttcggattctcaggcagaaaggcactgagtaccctggaacaggagaatatgacaagttctttggggagggagtctacagttgtgcaggttgcgggactccactctacaagtcaacgacaaaattcaattccggttgtggctggccagccttctatgagggtgttcctggagccataaaccgccacgcggacccagatggaatgaggatagaaataacatgtgctgcttgtgggggacatctcggtcatgtatttaaaggtgaaggatttccgacacccacgaacgaacgccattgtgtcaatagcatttcactaaaatttgcgccagccaattcctagttatttacaatgaagtccactctgtggatacatgatgctcatggtccataaagaactataacagtactgaaattgggactgtggcttataaagttgtacctaaagtatgtagcttaaataaatgttaaaccagatgttcctttatttccctcctctcctgggggttgtattatgtatgttctcaagtgcctgtattgttcctgagactgttttggtatgaaaaagtttaatgccatagagtgtagttatgtttgaacctattaagctgtttttaataaat

SEQ ID NO: 132 - protein, 189 aa, Medicago truncatula
MMVNILRITPLSSFNVTKPISSIRSNPTFLFNSLPTISIRQPKRGFRGGIVAMSAAPTPGSVQKSEEEWQAILSPEQFRILRQKGTEYPGTGEYDKFFGEGVYSCAGCGTPLYKSTTKFNSGCGWPAFYEGVPGAINRHADPDGMRIEITCAACGGHLGHVFKGEGFPTPTNERHCVNSISLKFAPANS

SEQ ID NO: 133 - DNA, 883 bp, Medicago truncatula
gcaccaggtttttatttatttttattttatgatgaaacccctcatttggagaatggcatctcatagtttgagtttgagcctatcagctgctgcacaaattcttcccaatacccaaattcagaaatttgattccaaacttttgttgtggccatcacgtttgcatactaaacccacaacaaaactttcttcttcaattcgggcaatgggctcttcagcttcttctaactccaacaacccaaacaccacagaaattcaatcaggatctagtcctgttgattataaatctttaagtgatgcagaatggaagaagcagctaaccgatgaacaattttatgttactcggaaaaagggaactgagagagctttcaccggggagtactggaataccaaaactgaagggacttaccattgcatatgttgtgacacacccttatttgaatcatctaccaagtttaatagtggaactggttggccatcttattaccagccaattggtaaaaatgtgaaatcaaagctagatttgtcaattatattcatgcctcgccaagaagttctctgtgctgtttgtgatgctcatctcggacacatttttgatgatggccctccacccacaggaaagcgttactgtatcaacagtgcttcccttaaactcaaaccaaggaagtaagatgatcaaatacttgtcactcaaatgtagatggtttaatattcaaatggtaactgaaaaatttgtaaatggatcagtatatcgtatacttttttctgtttttctttacttgaagaaagaaactgtcccgtcctgatagtgtatccaaatttttataaatgtgaaaacttgttgattactgtacaataccctatataatgaagttttaagtaagaa

SEQ ID NO: 134 - protein, 212 aa, Medicago truncatula
MMKPLIWRMASHSLSLSLSAAAQILPNTQIQKFDSKLLLWPSRLHTKPTTKLSSSIRAMGSSASSNSNNPNTTEIQSGSSPVDYKSLSDAEWKKQLTDEQFYVTRKKGTERAFTGEYWNTKTEGTYHCICCDTPLFESSTKFNSGTGWPSYYQPIGKNVKSKLDLSIIFMPRQEVLCAVCDAHLGHIFDDGPPPTGKRYCINSASLKLKPRK

SEQ ID NO: 135 - DNA, 1120 bp, Physcomitrella patens
gtagaagcagtgtcgtcggggctggattgcagagctttgttggagagggcgcgaagagagagtcagcagggccagggagaagcgtgtttttgggagctcaggtgcagaagatgggagcgggtatgtccgcgcggtcggatgtgcgacctgcagcagttccgaaagcttcaggagatgtcagtgagcagactgactataaaacattcagtgatgaggaatggaagaagcgtctgtctcaacagcaattctacgtcgcacgcaagaaaggcaccgaaagacctttcactggagagtactggaacaccaaaacagcaggaacatacctatgcgtttgttgtaagacaccattgttcagctcaaagaccaagttcgacagtggtaccggatggccatcttactatgacaccataggtgacaatgtgaagtcacacatggattggtcgatacccttcatgccccgcactgaggttgtgtgtgctgtgtgcgatgctcatctgggtcatgtcttcgacgatgggccgaggcctactggcaaacgttattgtatcaacagcgcggcgattgatttgaaggccgagaagcaagaagagaggaactaggtacgtcaaggtataggaaaggaggaagctgagacaattcaaaataccaaagaatataccagtttcgctgtaatctgtactgggctatatctcttaaaagtgacatatggcatttttttcgaatgcttctgagtgtatacacacccttttaaaaatgacgtgagagcttgatttcaagtgtactgagtgacccttatcgtactaaggttgaagcttcagaattggaccccaagtattggagcagaattatagaattgtgttggtcgctgctacagcctgcatggaattggaaggacgatgtataatataaccgtacaagcatttctggagatgagaacggtagaaatcaaatcaaacctggcagagaaaaccatttattgggtcgtcatgtagctgaaaaagtttttttctaccaagtttttgtacttacgacgactaaatggtttcttttaggtagttcagcactcctcaccactttggcagtagacaggaactgcttacaaatacactgtatacaatat

SEQ ID NO: 136 - protein, 162 aa, Physcomitrella patens
MGAGMSARSDVRPAAVPKASGDVSEQTDYKTFSDEEWKKRLSQQQFYVARKKGTERPFTGEYWNTKTAGTYLCVCCKTPLFSSKTKFDSGTGWPSYYDTIGDNVKSHMDWSIPFMPRTEVVCAVCDAHLGHVFDDGPRPTGKRYCINSAAIDLKAEKQEERN

SEQ ID NO: 137 - DNA, 1280 bp, Physcomitrella patens
gatatgttccagatagttccgattggaggatccttcttgcatcgagggttttaaccgacgactctagtgtggtcacatggctgcaggattgatctggctggagaagatgagaggcgtaggtctatgggatgtgtcgaaaagtgggcgataaacttgtgggcttcgtaggtaggacctaatccgtttgtagggaagttgcgagtgctgcagcagcgtggcaaagtggaagtgagaccacgctgaggttgctcaaaggaagtgaggagaatgtgtaggcctctaacaatcagtctcgctatggcatccatgctctccaccgtagtcactaacaccaccatcgccaagcctgcctccgccgcgcgctccttcaaagctgcctccaacgccgcctccctgcggccttccgtcttcaaactcacgcacaacccaacgcttcgtttcgaagccaggcggggagtggctatggcgtcagctggaggagctgagacccaagtgcagaagtctgaggaagagtggagggccattctgagccccgagcaattccgtatcctgcgtcaaaagggcactgaatatcctggtaccggtgagtacaacaagaacaaagccgaaggagtgtataattgcgctggctgtggaactcctctttacaaatcaaccactaagttcgactccggctgtggatggccagcattctttgagggccttcctggtgctatcaatgagacgaccgatgcagatggccgtcgtgtggagattacctgcgcagcttgtggaggtcacctggggcatgttttcaggggcgagggtttccctactccaactgacgcacggcactgtgtcaatagcgtctcattgaagtttacaccagcaaacaagtcttgaatttgaaatgtggttcctctagagaaacgcagcgtcagcttgcatgttgaaatcgagagtgcacattgtattgcacaaggacaacaatactatctatctaatacagtaggttagaggtgtactgttaatgtataaaattgtaagcttctcgtgttcagttctttcttaaggaatgattagcaatcggttttaatgtaaaatctacagctctgtagtatcaaggagcctgatctgcattatatgcacatgttttaatcatttgaagaattaaaactcaatcgactgctcagtgagaacgtgttgctttacttgagtttgggtagtcatcaagatgatcacacatggagaagtattaattttctctgttttgtatctgtaataccccatgatgattcttc

SEQ ID NO: 138 - protein, 204 aa, Physcomitrella patens
MCRPLTISLAMASMLSTVVTNTTIAKPASAARSFKAASNAASLRPSVFKLTHNPTLRFEARRGVAMASAGGAETQVQKSEEEWRAILSPEQFRILRQKGTEYPGTGEYNKNKAEGVYNCAGCGTPLYKSTTKFDSGCGWPAFFEGLPGAINETTDADGRRVEITCAACGGHLGHVFRGEGFPTPTDARHCVNSVSLKFTPANKS

SEQ ID NO: 139 - DNA, 927 bp, Physcomitrella patens
gtcagccttgctgttgttgttgttgttgtagccacgctccacaccacgctccacaaccctgctctcgtcgcgtcgtgcttcctgagctgctgctgttgctgatctcgatcgtcttgcttttctaacttagccacaatcgtcgtcacgaatcctggtgaggagtggtcatggcatcagctgggggttctgggacgcaagtgcggaagtctgacgaggagtggagagctattttgagccccgagcaattccgaatcttgcgaaaaaagggaactgaataccctaattccggcgagtacaataagacctataacgacggtgtgtataattgtgctggctgtgaagcgcctctttacaaatccaccacaaagtttgactccggctgtggatggccagcattctttgaggggatccccggtgccatcaatgaaacacgtgatgcagatggtcgtcgtgtggagattacatgcgctgcctgtggaggtcacttgggccacgttttcaagggcgagggatttcctacccctacggatgccaggcactgtgttaacagtgtctcgttgaagtttacaccagcgaacatggcttagattacaggtgttcatttctattaaaacagctgttgaagaaacaaggttggaggtccagtgcttctgcacaaagctttacgtttcatatagatttgtctatcagaagactcaattgagcacttcactttatataaactatcactctctccgacacatatctatatctatatatatataattatgttagtaagaggagcatcactttcatcacaggcatcttcgtcaaccatttggaagtaaattcaatggttttcattctgtgtgggctcgcaagcttaagcatactagactgtaaactcctagcttgtccgagtgttgtacatttctattattattaccc

SEQ ID NO: 140 - protein, 139 aa, Physcomitrella patens
MASAGGSGTQVRKSDEEWRAILSPEQFRILRKKGTEYPNSGEYNKTYNDGVYNCAGCEAPLYKSTTKFDSGCGWPAFFEGIPGAINETRDADGRRVEITCAACGGHLGHVFKGEGFPTPTDARHCVNSVSLKFTPANMA

SEQ ID NO: 141 - DNA, 634 bp, Solanum lycopersicum
gtactccccaattcaggttttcatcatcatcatcatcatcaagtaagagagggttcagaggtggggttgttgctatggctgcaccagactccgttcacaagtcagaggaagactggcgtgcaattctatctcctgagcagttccgtattctaagacagaaaggcactgagtatccaggtaccggagagtatgacaagttttctggtgaaggagtctaccaatgtgcaggatgtagcactcctctctacaagtccacagcaaaattcaactcaggctgtggttggccagctttctttgagggtcttcctggagcaattaatcgcactcctgaccctgatggcaggagggttgagattacatgtgctgcttgtggtggacatcttggtcatgttttcaaaggagaaggtcacaacacacccacagatgaacgacactgtgtcaacagcgtttctgtcaagtttatccctgcaaatacctcatctgttctactctgaaaatggtgtcgttttcaccttaccttaagacttggcaaatggtagagggctgaagcaactgtttgtgaacatgtttatgtttagtcttgaatgaataatagagattcatagaaccgatagtaaactattcaagactgaag

SEQ ID NO: 142 - protein, 139 aa, Solanum lycopersicum
MAAPDSVHKSEEDWRAILSPEQFRILRQKGTEYPGTGEYDKFSGEGVYQCAGCSTPLYKSTAKFNSGCGWPAFFEGLPGAINRTPDPDGRRVEITCAACGGHLGHVFKGEGHNTPTDERHCVNSVSVKFIPANTSSVLL

SEQ ID NO: 143 - DNA, 749 bp, Solanum lycopersicum
gctcaggattgaactttttatcgaaaccccaattgggattaaacagcaagccaacttttggaggattcaaaagcaaaatttcagtctcaattcgtgcaatgggctcctcagcttcttcttccaaatccgatagtgttcaagggggcagtaaaatggattatagctctataagcgacgaggagtggaagaagaagcttacaaatgaacaattttatattacacggcaaaagggtacagaacgggcattcactggggagtactggaacagtaagacccctggaacatatcactgcatttgctgcgatactcctttatttgaatcttctaccaaatttgatagtggaaccggatggccatcgtactaccagcccatagacaacaatgtgaagtcaaagatggacttgtctatcattttcatgcctcgtcaagaagttctatgtgcagcttgcgatgctcatcttgggcatgtatttgatgatggccctccgcctactggaaagcgttactgcatcaatagcgcttccctgaaattgaagccaaagtagagctgtgctgtgtagaataccaaaggttattgattcctcaagaaatgcaagatatcaagctgcagaattattcatatgcacgaataatgttgcttctaaagtttcaatcgaactttgagagagtttcttctctgtgatgttgttaaagttcatatgttcacatatacataatatataagttggtcaaatgtactcatttttagc

SEQ ID NO: 144 - protein, 148 aa, Solanum lycopersicum
MGSSASSSKSDSVQGGSKMDYSSISDEEWKKKLTNEQFYITRQKGTERAFTGEYWNSKTPGTYHCICCDTPLFESSTKFDSGTGWPSYYQPIDNNVKSKMDLSIIFMPRQEVLCAACDAHLGHVFDDGPPPTGKRYCINSASLKLKPK

SEQ ID NO: 145 - DNA, 793 bp, Solanum lycopersicum
  misc_feature (19)..(19): n is a, c, g, or t
agttttaagcatatatccntggcttctcgaaccatacaaatctcctctttcagctcaggattgaactttttatcgaaaccccaattgggattaaacggcaagccaacttttggaggattcaaaagcaaaatttcagtctcaattcgtgcaatgggctcctcagcttcttcttccaaatccgatagtgttcaagggggcagtaaaatggattatagctctataagcgacgaggagtggaagaagaagcttacaaatgaacaattttatattacacggcaaaagggtacagaacgggcattcactggggagtactggaacagtaagacccctggaacatatcactgcatttgctgcgatactcctttatttgaatcttctaccaaatttgatagtggaaccggatggccatcgtactaccagcccatagacaacaatgtgaagtcaaagatggacttgtctatcattttcatgcctcgtcaagaagttctatgtgcagcttgcgatgctcatcttgggcatgtatttgatgatggccctccgcctactggaaagcgttactgcatcaatagcgcttccctgaaattgaaggcaaagtagagctgtgctgtgtagaataccaaaggttattgattcctcaagaaatgcaagatatcaagctgcagaattattcatatgcacgaataatgttgcttctaaagtttcaatcgaactttgagagagtttcttctctgtgatgttgttaaagttcatatgttcacatatacataatatataaagtggtcaaatgtactca

SEQ ID NO: 146 - protein, 148 aa, Solanum lycopersicum
MGSSASSSKSDSVQGGSKMDYSSISDEEWKKKLTNEQFYITRQKGTERAFTGEYWNSKTPGTYHCICCDTPLFESSTKFDSGTGWPSYYQPIDNNVKSKMDLSIIFMPRQEVLCAACDAHLGHVFDDGPPPTGKRYCINSASLKLKAK

SEQ ID NO: 147 - DNA, 730 bp, Solanum lycopersicum
tcaagatgggttctcatattctcaaaatctcaccttttgcttcgtcaacccctctgtttatcaacgccaccccattcttgagatttcaagccaaaaaggttgttagcatttgtggtcatcccaagacccaattcaggttttcatcatcatcatcatcatcaagtaagagagggttcagaggtggggttgttgctatggctgcaccagactccgttcacaagtcagaggaagactggcgtgcaattctatctcctgagcagttccgtattctaagacagaaaggcactgagtatccaggtaccggagagtatgacaagttttctggtgaaggagtctaccaatgtgcaggatgtagcactcctctctacaagtccacagcaaaattcaactcaggctgtggttggccagctttctttgagggtcttcctggagcaattaatcgcactcctgaccctgatggcaggagggttgagattacttgtgcagcttgtggcggtcatcttggtcatgttttcaagggtgagggtttccctaccccaacggatgaacgccattgtgtcaatagtgtttccctcaagtttacaccagcaaattcttagttcatcgcatttgggatgtgatggttatcatagctttatatctctcatgcatagtttatatgatgatatgttaactactgatggcagtgttgtgttttggaaataaaagttacttttagtcttgtgctttc

SEQ ID NO: 148 - protein, 197 aa, Solanum lycopersicum
MGSHILKISPFASSTPLFINATPFLRFQAKKVVSICGHPKTQFRFSSSSSSSSKRGFRGGVVAMAAPDSVHKSEEDWRAILSPEQFRILRQKGTEYPGTGEYDKFSGEGVYQCAGCSTPLYKSTAKFNSGCGWPAFFEGLPGAINRTPDPDGRRVEITCAACGGHLGHVFKGEGFPTPTDERHCVNSVSLKFTPANS

SEQ ID NO: 149 - DNA, 919 bp, Solanum lycopersicum
aacaatggcagttgagaaatctgaggaagaatggcgtgctattctatctcctgagcagtttcgaatcctccgtcagaaaggaactgagctaaagggaagtggtgaatatgacaagttttttgatgaaggaatttataactgtgctggttgtggaactccattgtataaatcctcaaccaaatttgactctggctgtggttggcctgctttctttgagggtcttccggggacgataaatcgctctccagatccagatggaaggaggacggagattacatgtgctgcttgtggtggacatcttggtcatgttttcaaaggagaaggtcacaacacacccacagatgaacgacactgtgtcaacagcgtttctgtcaagtttatccctgcaaatacctcatctgttctactctgaaaatggtgtcgttttcaccttaccttaagacttggcaaatggtagagggctgaagcaactgtttgtgaacatgtttatgtttagtcttgaatgaataatagagattcatagaaccgatagtaaactatttcaagactgaagtatttttgatttattgatatatatgttggtggctattcaaagtctataaacacaacctatatcaaccattgtggttcgagttaggaaccactcaacaaattgcttctttgggtacttctccttagctttgtaaaacttttgggtgctagatttattcactgcatacccgcgcatcaactttctttcctttctgtctttgggctgtttggttggcacgacataataaatatatcttcgagggaaaacctttcttagtaacatgtatgtcatgttactaagaaaccagtctgctaattctaacattatgcttattatggatagtggttgtgattcagtttcaagcttatttaccgcaaggggtgtttt

SEQ ID NO: 150 - protein, 135 aa, Solanum lycopersicum
MAVEKSEEEWRAILSPEQFRILRQKGTELKGSGEYDKFFDEGIYNCAGCGTPLYKSSTKFDSGCGWPAFFEGLPGTINRSPDPDGRRTEITCAACGGHLGHVFKGEGHNTPTDERHCVNSVSVKFIPANTSSVLL

SEQ ID NO: 151 - DNA, 579 bp, Solanum lycopersicum
tatcatttccatggactctcagattctaaaattttggccaattattccttcaaaaaatttaattttcaactccaaaaaagcagttcccattcgtggcctatccaatacccgattccgggttgcggcagcggggtccgttcagaagtcagaggaggaatggcgtgccattctctcccctgaccaattccggattttgagacagaaaggcacagagactcaagggagtggagagtataacaagttttttggtgtaggcacctacctctgtgctggttgtggcactccactctacagatccgcaaccaaattcaactcaccctgtggctggccttctttttatgagggtctccctggggccataaatcgcaatccaaacccagatggcataaggatggaaataacttgtgctgcttgtggaggccatcttggtcatgtttttaaaggtgaatggtttcgtaccccaacaaatgaacgccattgtgtcaacagtatatccctcaagttcaaaccaccgcaattttcttaatgccctcttcctgactatatatatacgtcctgattatgtacaactttgatcta

SEQ ID NO: 152 - protein, 171 aa, Solanum lycopersicum
MDSQILKFWPIIPSKNLIFNSKKAVPIRGLSNTRFRVAAAGSVQKSEEEWRAILSPDQFRILRQKGTETQGSGEYNKFFGVGTYLCAGCGTPLYRSATKFNSPCGWPSFYEGLPGAINRNPNPDGIRMEITCAACGGHLGHVFKGEWFRTPTNERHCVNSISLKFKPPQFS

SEQ ID NO: 153 - DNA, 724 bp, Triticum aestivum
ttcggcacgaggcccccttgcgccacagctgcctgaaaaggagaaagggaaatgggcggagtccagcatctgctcaagctgaggatggcgtccccccacgcccacccggccacgcagcccctctccgcgctcccgtccctcctcctcgcccgctcctcctccgccgccgcgtcgtccgcccgccccgccgcctccctctccctccccctctcgtgctcgcgggcgcgggcctactgcccagccggacggcggttgccgggcgccgtggtggcgatgtcgtcgtcggcgcccgcgccggggcccgtgcagaagtcggaggaggagtgggaggccgtcctcacgccggagcagttccgcatcctccgccgcaagggcaccgagtatcctggaacaggtgaatatgacaagttcttcagtgagggtatttacggatgtgctggctgcggaacccccttgtacaaatcatctacgaagttcaactcagggtgtggttggccagcattctatgaaggatttcctggagccataaaacggacggcggatcctgatgggaggcgagttgagatcacatgtgctgcttgtgatgggcatctggggcatgtgttcaaaggggaggggttcaacacgccgactgatgagcgacactgcgtcaacagtatctcactcaagttcgttccggcctctgaagaggctagttgactgagctgatgaacatctatatgag

SEQ ID NO: 154 - protein, 215 aa, Triticum aestivum
MGGVQHLLKLRMASPHAHPATQPLSALPSLLLARSSSAAASSARPAASLSLPLSCSRARAYCPAGRRLPGAVVAMSSSAPAPGPVQKSEEEWEAVLTPEQFRILRRKGTEYPGTGEYDKFFSEGIYGCAGCGTPLYKSSTKFNSGCGWPAFYEGFPGAIKRTADPDGRRVEITCAACDGHLGHVFKGEGFNTPTDERHCVNSISLKFVPASEEAS

SEQ ID NO: 155 - DNA, 609 bp, Triticum aestivum
  misc_feature (3)..(3): n is a, c, g, or t
acncaggacgacccggcagcggcggcggcagctacagggcgggccgccgttcgcgccatgggcgccgcgccgtcttcgccctcgccgtccggacaagccccagggaaagcggataacgcgtctctgagtgatgaggagttgaagaagcgcctcacaaaagaacagtattacgtcactcggcagaagggaactgagagggcattcacaggggaatactggaacactaaaaccccaggcatctaccattgcatctgctgtgacacccctctgtttgagtcatcaaccaagtttgatagtggtactggatggccgtcctattaccagccggttggcgacaatgtgaaaagcaagcttgatatgtcgatcttcttcatgcctcggaccgagtccctgtgtgccgtctgcgacgctcacctggggcatgttttcgacgacgggccaccgccgactgggaagagatattgcatcaacagcgcgtctctgaagtttaagccccagtagtccctggaagaagaatcaagatgcaagcaccagtgcgtcccatgtaaattttggttttggtatgaactatttccagtgtagtagcctagtccgcccggtctgcgcatg

SEQ ID NO: 156 - protein, 147 aa, Triticum aestivum
MGAAPSSPSPSGQAPGKADNASLSDEELKKRLTKEQYYVTRQKGTERAFTGEYWNTKTPGIYHCICCDTPLFESSTKFDSGTGWPSYYQPVGDNVKSKLDMSIFFMPRTESLCAVCDAHLGHVFDDGPPPTGKRYCINSASLKFKPQ

SEQ ID NO: 157 - DNA, 836 bp, Triticum aestivum
ccacgcgtccgagtcgcccccaccgcgcaacaaaaagtctccgctatcctcttcccctcctctgctctctctcgatgcgtgcgcctccctgtctccctcctcggcgctccgccggcttcttgctcccccgcgttcgccgcgcgcgctagcgcgaccgatggcgtccggcgacagcaagccgaggagcgaggaggagtggcgcgccgtcctcaaccccgagcagttccgcatcctccgcctcaagggcaccgagttgccgggaacaggcgagtacaacaagttctacggtgatggggcgtacaagtgcgctggctgcggaacgcccctgtacaaatccaccaccaaatttgactctggctgtggctggccggccttctttgaaggacttcctggagccatacacaggacgcctgaccctgatggtaggagggtagagatcacatgtgcatcttgcggcgggcatttgggccatgtcttcaagggagaaagcttcaagacccctaccgatgagccgcactgcgtcaacagcgtttccatcaaggtttactcctgccctcctcctgattccagttcttggagtcattgggatgaacttcctcaggtccctaaaacccgtgaaaaacaattatggatttaggtccccagagccccgtttttcctcgaaagttatggtggaatggaatttccgcccaaacccaaagtttgccgaaaaagtccggaaaaataaaacactgggataaggaatcttgcgcaagttttcctgccgtgttaaccccaaggctggaaaaccctggaaactcccaaaatcctggttccgggctcgaaaaaagttctct

SEQ ID NO: 158 - protein, 159 aa, Triticum aestivum
MASGDSKPRSEEEWRAVLNPEQFRILRLKGTELPGTGEYNKFYGDGAYKCAGCGTPLYKSTTKFDSGCGWPAFFEGLPGAIHRTPDPDGRRVEITCASCGGHLGHVFKGESFKTPTDEPHCVNSVSIKVYSCPPPDSSSWSHWDELPQVPKTREKQLWI

SEQ ID NO: 159 - DNA, 1195 bp, Triticum aestivum
ggggcgaatccacccctcggggtttagccgaggccgcggggggggaataacaatttaaccagggaaccaggattgcccatatggccctattttgggggcccctaagaaccaagtttgtaccaaaaagcaggctggtacccgtcgggaattccccggatatgttcaacgcaacgcgtcccggacttggagccgaggaccctgacatggactgaaggagtaggaaacaacggcctgaaagggagaaaggggaatgggcggagtccagcatctgctcaagctgaggatggggtcccccccacgcccaacccggccacgcagcccctctccgcgctcccgtccctcctcctcgcccgctcctcctccgccgccgggtcgtccgcccgccccgccgcctccctctccctccccctctcgtgctcgcgggcgcgggcctactgcccagccggacggcggttgccgggcgccgtggtggcgatgtcgtcgtcggcgcccgcgccggggcccgtgcagaagtcggaggaggagtgggaggccgtcctcacgccggagcagttccgcatcctccgccgcaagggcaccgagtatcctggaacaggtgaatatgacaagttcttcagtgagggtatttacggatgtgctggctgcggaacccccttgtacaaatcatctacgaagttcaactcagggtgtggttggccagcattctatgaaggatttcctggagccataaaacggacggcggatcctgatgggaggcgagttgagatcacatgtgctgcttgtgatgggcatctggggcatgtgttcaaaggggaggggttcaacacgccgactgatgagcgacactgcgtcaacagtatctcactcaagttcgttccggcctctgaagaggctagttgactgagctgatgaacatctatatgagaaatggaaacaaaatcttttgtgcaaccatcatagtgactgctggatgtcagaactcagtacttttgacaataatgcaagccccaagtaccgatgctcgctgctaattttggcagtatatactgttacatgtgtaaattctaggttttgttttccctgtggaaattaatagtgagatgtacatttaaaaataaagccgcctgaagaatgcagctcacgttgtttccctttgtgcccaacataatatcttagtgattatccgcaatacacc

SEQ ID NO: 160 - protein, 141 aa, Triticum aestivum
MSSSAPAPGPVQKSEEEWEAVLTPEQFRILRRKGTEYPGTGEYDKFFSEGIYGCAGCGTPLYKSSTKFNSGCGWPAFYEGFPGAIKRTADPDGRRVEITCAACDGHLGHVFKGEGFNTPTDERHCVNSISLKFVPASEEAS

SEQ ID NO: 161 - DNA, 744 bp, Triticum aestivum
cccgcgtccggggaaatgggcggagtccagcatctgctcaagctgaggatggcgtcgccccacgcccacccggccacgcggcccctctcatcgctcccgtccctcctcctcgcccgctcctcctccgccgccaccgccgccgcgtcgtccgcccgccccgcctccctctccctctcgtgctcgcggtcgcgggcgcgggcctactgcccagccggacgacggttgccgggcgccgtggtggctatgtcgtcggcggcgcccacgccggggcccgtgcagaagtcggaggaggagtgggaggccgtcctcacgccggagcagttccgcatcctccgccgcaagggcaccgagtatcctggaacaggtgaatatgacaagttcttcagtgagggtatttacggatgtgctggctgtggaacccccttgtacaaatcatctacgaagttcaactcagggtgtggttggccagcattctatgaaggatttcctggagccataaaacggacggcggatcctgatgggaggcgaattgagatcacatgtgctgcttgtgaaggacatctggggcatgtgttcaaaggggaggggttcaacacgccgactgatgagcgacactgcgtcaacagtatctcactcaagttcgttccggcctctgaagaggctagttgactgagctgatgaacatctatatgagaaatggaacaaaacctttgtgcaacatcatagtgactactggatgtcaga

SEQ ID NO: 162 - protein, 217 aa, Triticum aestivum
MGGVQHLLKLRMASPHAHPATRPLSSLPSLLLARSSSAATAAASSARPASLSLSCSRSRARAYCPAGRRLPGAVVAMSSAAPTPGPVQKSEEEWEAVLTPEQFRILRRKGTEYPGTGEYDKFFSEGIYGCAGCGTPLYKSSTKFNSGCGWPAFYEGFPGAIKRTADPDGRRIEITCAACEGHLGHVFKGEGFNTPTDERHCVNSISLKFVPASEEAS

SEQ ID NO: 163 - DNA, 919 bp, Triticum aestivum
ccacgcgtccggggaactgagagggcattcacaggggaatactggaacactaaaaccccaggctgctaccttggtctcgtcccgagcgcacctgtcctcctacctcccgcccctcctcccctccgcgcgaccccggcccaggacgacccgcagcggcggcggcagcttcaggcgggccgccgttcgcgccatgggcgccgcgccgtcttcgccctcgccgtccggacaagccccagggaaagcggataacgcgtctctgagtgatgaggagttgaagaagcgcctcacaaaagaacagtattacgtcactcggcagaagggaactgagagggcattcacaggggaatactggaacactaaaaccccaggcatctaccattgcatctgctgtgacacccctctgtttgagtcatcaaccaagtttgatagtggtactggatggccgtcctattaccagccggttggcgacaatgtgaaaagcaagcttgatatgtcaatcttcttcatgcctcggaccgagtccctgtgtgccgtctgcgacgctcacctggggcatgttttcgacgacgggccaccgccgactgggaagagatattgcatcaacagcgcgtctctgaagtttaagccccagtagtccctggaagaagaatcaagatgcaagcaccatcgcgtcccatgtaaattttggtttgggtatgaactatttccagtgtagtagcctaatccgcccggtctgcgcatgtaaattgataatttccaggtttgtaatttgtaaagccatttgtccgaaacatctgcatgttcctccatgggcagtatcgttggcccttctgagtgtcaggagttcctgtgactggggctttaaacatcatgatatcagagaagaaattgggctgcatctgaggtactccctccgttc

SEQ ID NO: 164 - protein, 147 aa, Triticum aestivum; identical to SEQ ID NO: 156

SEQ ID NO: 165 - DNA, 951 bp, Zea mays
cggtgtcacaaaacctgaccgatggcggcccggtgctccacagctgcctccgtgtccgtggtcagaacaggatcgcgagacctctccccctccttttccttcacagccgcggcgctcccctcggcgcgtctgaggccggtaggagcgtgggtccgcggtggagggtacacctgcaggctccgcgccgtctgcgccatgggctccgcgccgtcgtcgtcccaatccccgtcgccgcacacgccttcaggacaaacccaagggaaagcagattataaatcactgagtgaagaggagtggaagaagcgcctgactgaagagcagtattatgttactcggcagaagggcactgaaagagcattcactggggaatactggaatactaaaaccccaggcatttatcagtgtgtctgctgcgacacccctctgtttcagtcatcaaccaaatttgatagtggtactgggtggccatcctattataaaccaattggtgaaaatgtcaagagcaagcttgatatgtcaatcatttttatgccccggaccgaggtgctctgtgcaacctgtgatgctcatctggggcatgtcttcgatgacgggccaccaccaacagggaagagatactgtatcaatagtgcatctctgaaattgaagccccaatagttgctggatactttagcaagaagtcaactataacgctggtccgccctatgtaaacttcggggttatgtatataaactactcgagttgtagcatatttattattctctttgttatgtaatatatgtgttcacaaaccgatgaaagtatgaaacaaacagccgctacttcactctggtattctggtctagaattaaggtgttgtttggttgacgaattgtaacgtaaatggcaacggtaatggtttgcactcgagtgacagttgacaacggtaataaatttaaatagatctttatt

SEQ ID NO: 166 - protein, 211 aa, Zea mays
MAARCSTAASVSVVRTGSRDLSPSFSFTAAALPSARLRPVGAWVRGGGYTCRLRAVCAMGSAPSSSQSPSPHTPSGQTQGKADYKSLSEEEWKKRLTEEQYYVTRQKGTERAFTGEYWNTKTPGIYQCVCCDTPLFQSSTKFDSGTGWPSYYKPIGENVKSKLDMSIIFMPRTEVLCATCDAHLGHVFDDGPPPTGKRYCINSASLKLKPQ

SEQ ID NO: 167 - DNA, 1619 bp, Zea mays
aataaaaatctatttaaatttattaccattgtcaactgtcactcaagtgcaaaccattaccgttgtcatttacgttacaattcgtcaaccaaacaataccttagttctagaccagaataccagagtgaagtagcggctgcttgtttcatcggtttgtggacacatatatattacataacaaagagaataataaatatgctacaactcgagtagtttatatacagaaacccgaagtttacatagggcggaccagcgttatagttgacttcttgctaaagtatccagcaactattggggcttcaatttcagagatgcactgttgatacagtacctcttccctgttggtggtggcccgtcatcgaagacatgccccagatgagcatcacaggttgcacagagcacctcggtccggggcataaaaatgattgacatatcaagcttgctcttgacattttcaccaattggtttataataggatggccacccagtaccactatcaaatttggttgatgactgaaacagaggggtgtcgcagcagacacactgataaatgcctggcgttttagtattccagtattccccagtgaatgctctttcagtgcccttctgccgagtaacataatactgctcttcagtcaggcgccttcgctgtcgacgatttcgtacgaaatcgtcgacagcgaagttgttgagcgcggagagaggagaggcgcagagcatcgacgatggcgagcggcagcatgaagagggagatcagcgagacccacgacaccctccgcttcggcctcaatgccggcgtcaaggccgacctcgcgccgccgcacccgctccagtccagcatccaatcggaggccaagttctgggcggacaagaagaagtttgggacagaggccatctacggatccgccttgaacatccgcaaggatctcgatgcccaaatcctctcaaggttccaaaggccccctggtgctttgccatcatctctgcttggatatgaggcactgacaggttccctagatgattttggttttgaagattatcttaacatgcctcaagattctgaaggtttccgtcaacctgacatgcaccacggaatggaggttcgccttggtttgtccaagggacctatctgccctagcttcagttgaggcagtgaatgtagttctgcggttctgccgcacgttgatgcaccttagtccagtacactcgggtcaataaaagaccacattaggatggtgaaacggtgaaaactgatggcttgcatatgttcagagtgttatgttgtaatgaacagtgttatgttgtaatgaacgcatatatcgcatgattgatagcttggctagctgtgcgcaggcttagtggaagcattgactggggtgcaggtcggcgcgagcccggctcttatgggtgtaggaaccaatcacgccgattgtgaagcatcgcagttgagcttcaggatctctgcagctgcaggtggcttcttccgtactcgaattagaggtggctgtgaattgcaatccttttgttatttttttctaacttgtacggaggaaagcaatccataggaatttttaaagaaaattgatgagattaaatccaataaaaaaaaaaaaaaaaaa

SEQ ID NO: 168 - protein, 143 aa, Zea mays
MLCASPLSALNNFAVDDFVRNRRQRRRLTEEQYYVTRQKGTERAFTGEYWNTKTPGIYQCVCCDTPLFQSSTKFDSGTGWPSYYKPIGENVKSKLDMSIIFMPRTEVLCATCDAHLGHVFDDGPPPTGKRYCINSASLKLKPQ

SEQ ID NO: 169 - DNA, 1592 bp, Zea mays
tttttttttttaataaagatctatttaaatttattaccgttgtcaactgtcactcgagtgcaaaccattaccgttgccatttacgttacaattcgtcaaccaaacaacaccttaattctagaccagaataccagagtgaagtagcggctgtttgtttcatactttcatcggtttgtgaacacatatattacataacaaagagaataataaatatgctacaactcgagtagtttatatacataaccccgaagtttacatagggcggaccagcgttatagttgacttcttgctaaagtatccagcaactattggggcttcaatttcagagatgcactgcacggaaaaaggatagcagtgagcacaagaagtgacaatttagttaacctatttgccccacgttctcaacatttttccagattcatcgcagctatggcagcacgataatggaaatagatgctctccactacctccctctcccacctgccagtgactcagttgctgtttgattcataaaatgtgacgtaatgctcaagtagcaatggtaataagtttaaataggctgatatcactttctagtgtagtattcgattacggttggacttaaacaaacatgtagtattcgattacggttggacttaaacaaatatgatttaatgttatcaattaccatcacgttagaaatatgtgaaccaaacagcacctcagatcataagaaagtacaggcaagtgggcttgattgtcagtggctcactgcagaggaaagtgcagcaggactcgcaatgacacaatccctagacctattaccaccaccgaaacgtgtgcagaccaaaccttggagttagagaggacatggagcggggtaatgtggctataaacggaagcgaaattatacctattgatacagtatctcttccctgttggtggtggcccgtcatcgaagacatgccccagatgagcatcacaggttgcacagagcacctcggtccggggcataaaaatgattgacatatcaagcttgctcttgacattttcaccaattggtttataataggatggccacccagtaccactatcaaatttggttgatgactgaaacagaggggtgtcgcagcagacacactgataaatgcctggggttttagtattccagtattccccagtgaatgctctttcagtgcccttctgccgagtaacataatactgctcttcagtcaggcgcttcttccactcctcttcactcagtgatttataatctgctttcccttgggtttgtcctgaaggcgtgtgcggcgacggggattgggacgacgacggcgcggagcccatggcgcagacggcgcggagcctgcaggtgtaccctccaccgcggacccacgctcctaccggcctcagacgcgccgaggggagcgccgcggctgtgaaggaaaaggagggggagaggtctcgcgatcctgttctgaccacggaggcagctgtggagcaccgggccgccatcggtcaggttttgtgacaccgagctctgatgcttgttggatggcgcaccaccgatgctggtaataactacacaacagtgcgtgcagccaggcgcagcc

SEQ ID NO: 170 - protein, 248 aa, Zea mays
MAARCSTAASVVRTGSRDLSPSFSFTAAALPSARLRPVGAWVRGGGYTCRLRAVCAMGSAPSSSQSPSPHTPSGQTQGKADYKSLSEEEWKKRLTEEQYYVTRQKGTERAFTGEYWNTKTPGIYQCVCCDTPLFQSSTKFDSGTGWPSYYKPIGENVKSKLDMSIIFMPRTEVLCATCDAHLGHVFDDGPPPTGKRYCINRYNFASVYSHITPLHVLSNSKVWSAHVSVVVIGLGIVSLRVLLHFPLQ

SEQ ID NO: 171 - DNA, 1219 bp, Zea mays
tttttttttttttttaatcacgccagagtaacagctgatgtaaatgacgaatcacgtagagtaacagctgcttatgattagtttcatctcacagccagagtagcagaatgcacgcacgcacacatgctcaataaatcttattcgtcgctttggtgtacttcccacagttccaggacacgagaatctcaagatgatctaggaggagccaggactgaacttgatcgagacgctattcacgcagtggcgctcatcagtaggtgtcttgaagccttcacccttgaacacatggcccagatggccaccgcaggctgcacatgtgatctctaccctcctaccatcaggatctggtgttcggtttatggctcctggaagcccctcaaagaatgcaggccagccgcagccagaatcaaattttgtggcggacttgtacaggggagtcccgcagccagcgcagttataaaccccgtcgccgtagaatttgttgtactctcctgtcccgggtaacctggacatcaatgtgagcctagcttgagaacagatgtttaattactatggggccatttacatgccgagtgacaggtacgatggtattttcctggagcaaggtccaaagcctccaaggtaacagaaagcacggtactggaattgccagtatatgatttctttccttccaacaccttattaagggtttgttcggttctaccccaatccgtatggattaagggggttttaatccctagtaagtcaaaatctctctcaatccgtatcaattccctccaattcatatggattggaaataaccgaacaagccctaactaggaatccatgactgaacatagcctgaagagcttgataaagcattcacagttacacacacatgtaactgctccactcttctaatagaggttaaggttacagctcacaaatcagcatcaccattcgaaatttgtaaatttgcatgtataggcggtaattactaacgactgttcaaaattgtgctataattttacccacaagatattccaatgatagtcaactgacacttggatcaacagtgttttacttccaatcagtatttcaaatcacaggctatgacatctggctacctgcctcctcaaacagctaatcgccagataaatctggctttagcagctaaagtgtacatggggagcaaatagctaaatcctcctcaaacaacgagatccggagatgaaacccg

SEQ ID NO: 172 - protein, 105 aa, Zea mays
MSRLPGTGEYNKFYGDGVYNCAGCGTPLYKSATKFDSGCGWPAFFEGLPGAINRTPDPDGRRVEITCAACGGHLGHVFKGEGFKTPTDERHCVNSVSIKFSPGSS

SEQ ID NO: 173 - protein, 4 aa, Artificial sequence
  Motif 1
QYRS

SEQ ID NO: 174 - protein, 6 aa, Artificial sequence
  Motif 2
  VARIANT (1)..(1): / replace = "His" / replace = "Glu" / replace = "Asp" / replace = "Gly"
  VARIANT (2)..(2): / replace = "Ser"
  VARIANT (3)..(3): / replace = "Arg"
  VARIANT (4)..(4): / replace = "Lys" / replace = "Arg"
  VARIANT (5)..(5): / replace = "Phe"
  VARIANT (6)..(6): / replace = "Cys" / replace = "Glu"
YHQQYL

SEQ ID NO: 175 - protein, 8 aa, Artificial sequence
  Motif 3
  VARIANT (1)..(1): / replace = "Val"
  VARIANT (2)..(2): / replace = "Met" / replace = "Ile" / replace = "Ala" / replace = "Arg" / replace = "Phe" / replace = "Thr"
  VARIANT (3)..(3): / replace = "Val" / replace = "Arg"
  VARIANT (4)..(4): / replace = "Asp" / replace = "Thr"
  VARIANT (5)..(5): / replace = "Val" / replace = "Gln"
  VARIANT (6)..(6): / replace = "Lys" / replace = "Ala" / replace = "Val" / replace = "Ile"
  VARIANT (7)..(7): / replace = "Gly" / replace = "Thr" / replace = "Lys"
  VARIANT (8)..(8): / replace = "Ser" / replace = "Pro" / replace = "Thr" / replace = "Gln"
IVTEILPA

SEQ ID NO: 176 - protein, 97 aa, Artificial sequence
  Motif 4
  UNSURE (1)..(1): Xaa can be any one of Ala, Phe, Thr or a gap
  UNSURE (2)..(2): Xaa can be any one of Gln, Val, Glu, Ser, Cys, Thr or a gap
  UNSURE (3)..(3): Xaa can be any one of Phe, Ile, Ala or a gap
  UNSURE (4)..(4): Xaa can be any one of Gly, Ala or a gap
  UNSURE (5)..(5): Xaa can be any one of Ala, Leu, Ser, Thr or a gap
  UNSURE (6)..(6): Xaa can be Gly or a gap
  UNSURE (7)..(7): Xaa can be any one of Cys, Ser or a gap
  UNSURE (8)..(8): Xaa can be Phe or a gap
  UNSURE (9)..(9): Xaa can be Trp or a gap
  UNSURE (10)..(10): Xaa can be any one of Gly, Arg, Ser or a gap
  UNSURE (11)..(11): Xaa can be any one of Val, Ser, Gly or a gap
  UNSURE (12)..(12): Xaa can be Glu or a gap
  UNSURE (13)..(13): Xaa can be Leu or a gap
  UNSURE (14)..(14): Xaa can be any one of Ala, Met, Gly, Val, Thr or a gap
  UNSURE (15)..(15): Xaa can be any one of Phe, Cys, Ala, Tyr or a gap
  UNSURE (16)..(16): Xaa can be any one of Gln, Trp, Arg, Gly or a gap
  UNSURE (17)..(17): Xaa can be any one of Arg, Cys, Glu or a gap
  UNSURE (18)..(18): Xaa can be any one of Val, Ile, Leu, Ser, Ala or a gap
  UNSURE (19)..(19): Xaa can be any one of Pro, His, Arg, Asn, Ser or a gap
  UNSURE (20)..(20): Xaa can be Gly or a gap
  UNSURE (21)..(21): Xaa can be any one of Val, Leu or a gap
  UNSURE (22)..(22): Xaa can be any one of Thr, Val, Ile, Tyr, Arg, Ala or a gap
  UNSURE (23)..(23): Xaa can be any one of Lys, Arg, Glu, Ser, Ala, Tyr, Gln, Val or a gap
  UNSURE (24)..(24): Xaa can be any one of Thr, Ala or a gap
  UNSURE (25)..(25): Xaa can be any one of Glu, Ser, Arg, Ala or a gap
  UNSURE (26)..(26): Xaa can be any one of Val, Ala or a gap
  UNSURE (27)..(27): Xaa can be Gly or a gap
  UNSURE (28)..(28): Xaa can be Tyr or a gap
  UNSURE (29)..(29): Xaa can be any one of Thr, Ser, Ala, Val, Ile or a gap
  UNSURE (30)..(30): Xaa can be any one of Gln, Gly, Ala, His or a gap
  UNSURE (31)..(31): Xaa can be Gly or a gap
  UNSURE (32)..(32): Xaa can be any one of Asn, Ser, Leu, His, Lys, Ala, Asp, Gln or a gap
  UNSURE (33)..(33): Xaa can be any one of Leu, Lys, Ser, Thr, Ile, Val, Phe, Arg, Met or a gap
  UNSURE (34)..(34): Xaa can be any one of His, Thr, Ala, Ser, Gln, Lys, Glu, Pro, Asp or a gap
  UNSURE (35)..(35): Xaa can be any one of Asn, Asp, His, Arg, Gly, Glu, Met or a gap
  UNSURE (36)..(36): Xaa can be Pro or a gap
  UNSURE (37)..(37): Xaa can be any one of Thr, Ser, Leu, Asn, Asp or a gap
  UNSURE (38)..(38): Xaa can be Tyr or a gap
  UNSURE (39)..(39): Xaa can be any one of Glu, Arg, Lys, Tyr, Gly, Gln or a gap
  UNSURE (40)..(40): Xaa can be any one of Asp, Ala, Leu or a gap
  UNSURE (41)..(41): Xaa can be any one of Val, Glu, Asp, Ala, Ile or a gap
  UNSURE (42)..(42): Xaa can be any one of Cys, Tyr or a gap
  UNSURE (43)..(43): Xaa can be any one of Thr, Ser, Arg, His, Gly or a gap
  UNSURE (44)..(44): Xaa can be any one of Gly, Asn, Ser or a gap
  UNSURE (45)..(45): Xaa can be any one of Ala, Leu, Val, Gln, Arg, Lys, Thr, Asp, Met or a gap
  UNSURE (46)..(46): Xaa can be any one of Thr, Gly, Ala or a gap
  UNSURE (47)..(47): Xaa can be any one of Tyr, Asp, Gly, Asn, Ser, Lys or a gap
  UNSURE (48)..(48): Xaa can be His or a gap
  VARIANT (49)..(49): / replace = "Ala" / replace = "Thr" / replace = "Val" / replace = "Asn" / replace = "Met"
  VARIANT (50)..(50): / replace = "Gln"
  VARIANT (51)..(51): / replace = "Ser" / replace = "Phe" / replace = "Ala" / replace = "Gly" / replace = "Cys"
  VARIANT (52)..(52): / replace = "Leu" / replace = "Asp"
  VARIANT (53)..(53): / replace = "Gln" / replace = "Glu" / replace = "Lys" / replace = "Tyr"
  VARIANT (54)..(54): / replace = "Ile" / replace = "Leu / replace = "Met"
  VARIANT (55)..(55): / replace = "His" / replace = "Glu" / replace = "Thr" / replace = "Val" / replace = "Ile"
  VARIANT (56)..(56): / replace = "Phe"
  VARIANT (57)..(57): / replace = "Asn"
  VARIANT (58)..(58): / replace = "Val" / replace = "Leu"
  VARIANT (59)..(59): / replace = "Arg" / replace = "Ser" / replace = "Gln" / replace = "Ala" / replace = "Asn"
  VARIANT (60)..(60): / replace = "Val" / replace = "Leu" / replace = "Ile" / replace = "Met" / replace = "Gln" / replace = "Glu" / replace = "Asp" / replace = "Asn"
  VARIANT (61)..(61): / replace = "Ile" / replace = "Val" / replace = "Gly"
  VARIANT (62)..(62): / replace = "Pro" / replace = "Thr" / replace = "Gly" / replace = "Gln" / replace = "His"
  VARIANT (63)..(63): / replace = "Phe"
  VARIANT (64)..(64): / replace = "Arg" / replace = "Ser" / replace = "Lys" / replace = "Thr" / replace = "Glu" / replace = "Gln"
  VARIANT (65)..(65): / replace = "Gln" / replace = "Lys" / replace = "Asn" / replace = "Thr" / replace = "Ser"
  VARIANT (66)..(66): / replace = "Ile"
  VARIANT (67)..(67): / replace = "Val"
  VARIANT (68)..(68): / replace = "Glu" / replace = "Ser" / replace = "Ala" / replace = "Lys"
  VARIANT (69)..(69): / replace = "Phe" / replace = "Ile" / replace = "Leu" / replace = "Met" / replace = "Ala" / replace = "Thr"
  VARIANT (70)..(70): / replace = "His" / replace = "Leu"
  VARIANT (71)..(71): / replace = "Tyr"
  VARIANT (72)..(72): / replace = "Ser" / replace = "Gln" / replace = "Lys" / replace = "Thr" / replace = "Asp" / replace = "Asn"
  VARIANT (73)..(73): / replace = "Lys" / replace = "Ser" / replace = "Met" / replace = "Asn"
  VARIANT (75)..(75): / replace = "Asn"
  VARIANT (76)..(76): / replace = "Ser"
  VARIANT (77)..(77): / replace = "Arg"
  VARIANT (78)..(78): / replace = "Gln" / replace = "Glu" / replace = "Ala"
  VARIANT (79)..(79): / replace = "Pro" / replace = "Val" / replace = "Ile" / replace = "Gly" / replace = "Lys" / replace = "Phe"
  VARIANT (80)..(80): / replace = "Phe" / replace = "His" / replace = "Met" / replace = "Asp"
  VARIANT (81)..(81): / replace = "Gly"
  VARIANT (83)..(83): / replace = "Val"
  VARIANT (84)..(84): / replace = "Pro" / replace = "Gly" / replace = "Ala" / replace = "Glu"
  VARIANT (85)..(85): / replace = "Leu"
  VARIANT (86)..(86): / replace = "Gln" / replace = "Arg" / replace = "Leu" / replace = "Ser"
  VARIANT (88)..(88): / replace = "Asn" / replace = "Ala" / replace = "Ser" / replace = "Pro"
  VARIANT (93)..(93): / replace = "Val" / replace = "Ala" / replace = "Cys" / replace = "Ile"
  VARIANT (94)..(94): / replace = "Val" / replace = "Leu"
  VARIANT (95)..(95): / replace = "Phe"
  VARIANT (96)..(96): / replace = "Thr" / replace = "Phe" / replace = "Cys"
  VARIANT (97)..(97): / replace = "Asn" / replace = "His" / replace = "Gln" / replace = "Thr" / replace = "Ser"
XXXXXXXXXXXXXXXXXXXXXXXXXXXXXXXXXXXXXXXXXXXXXXXXSEVVRVQYDPKACKYDDLLDVFWARHDPTTLNRQGNDVGTQYRSGIYYY

SEQ ID NO: 177 - protein, 3 aa, Artificial sequence
  Motif 5
GWP

SEQ ID NO: 178 - protein, 11 aa, Artificial sequence
  Motif 6
  VARIANT (1)..(1): / replace = "Val"
  VARIANT (2)..(2): / replace = "Phe" / replace = "Leu"
  VARIANT (3)..(3): / replace = "Asp" / replace = "Glu" / replace = "Gln" / replace = "Ser" / replace = "Arg"
  UNSURE (4)..(4): Xaa can be any one of Ser, Thr or a gap
  UNSURE (5)..(5): Xaa can be any one of Thr, Ser, Ala, Ile, Leu, Lys, Asp or a gap
  UNSURE (6)..(6): Xaa can be any one of Thr, Ala or a gap
  UNSURE (7)..(7): Xaa can be Lys or a gap
  UNSURE (8)..(8): Xaa can be Phe or a gap
  UNSURE (9)..(9): Xaa can be any one of Asp, Asn or a gap
  VARIANT (10)..(10): / replace = "Ala" / replace = "Arg"
  VARIANT (11)..(11): / replace = "Pro"
LYKXXXXXXSG

SEQ ID NO: 179 - protein, 9 aa, Artificial sequence
  Motif 7
  UNSURE (1)..(1): Xaa can be any one of Gly, Asp, Glu, Asn or a gap
  UNSURE (2)..(2): Xaa can be any one of Gly, Ala, Ser, Ile or a gap
  UNSURE (3)..(3): Xaa can be any one of His, Phe or a gap
  UNSURE (4)..(4): Xaa can be any one of Leu, Phe or a gap
  UNSURE (5)..(5): Xaa can be any one of Gly, Phe, Cys or a gap
  VARIANT (6)..(6): / replace = "Phe"
  VARIANT (7)..(7): / replace = "Ile, / replace = "Ser"
  VARIANT (8)..(8): / replace = "Thr" / replace = "His" / replace = "Leu" / replace = "Val"
  VARIANT (9)..(9): / replace = "Asp" / replace = "Pro" / replace = "Met" / replace = "Leu" / replace = "Ile" / replace = "Arg"
XXXXXHVFK

SEQ ID NO: 180 - protein, 40 aa, Artificial sequence
  Motif 8
  UNSURE (1)..(1): Xaa can be any one of Lys, Arg, Leu, Thr, Trp, Leu, Phe, Ile or a gap
  UNSURE (2)..(2): Xaa can be any one of Ser, Thr, Arg, Gln, Pro, Lys, Gly or a gap
  UNSURE (3)..(3): Xaa can be any one of Glu, Asp, As,; Ala, Thr, Lys or a gap
  UNSURE (3)..(3): Xaa can be any one of Glu, Asp, Asn, Ala, Thr, Lys or a gap
  UNSURE (4)..(4): Xaa can be any one of Glu, Ala, Gln, Gly, Arg or a gap
  UNSURE (5)..(5): Xaa can be any one of Glu, Asp, Arg or a gap
  UNSURE (6)..(6): Xaa can be any one of Trp, Leu, Gln or a gap
  UNSURE (7)..(7): Xaa can be any one of Arg, Lys, Ala, Val, Glu, Gln or a gap
  UNSURE (8)..(8): Xaa can be any one of Ala, Val, Lys, Thr, Gln, Arg or a gap
  UNSURE (9)..(9): Xaa can be any one of Val, Ile, Gln, Arg, Lys, Gly or a gap
  UNSURE (10)..(10): Xaa can be any one of Leu, Ala or a gap
  UNSURE (11)..(11): Xaa can be any one of Ser, Thr, Glu, Asn or a gap
  UNSURE (12)..(12): Xaa can be any one of Pro, Asp, Ser, Gln, Ala, Asn, Glu, Lys or a gap
  UNSURE (13)..(13): Xaa can be any one of Glu, Asp, Gln, Ala or a gap
  VARIANT (14)..(14): / replace = "Glu" / replace = "Ala"
  UNSURE (15)..(15): Xaa can be any one of Phe, Tyr, Arg or a gap
  UNSURE (16)..(16): Xaa can be any one of Arg, Tyr, His, Lys, Thr, Gln or a gap
  UNSURE (17)..(17): Xaa can be any one of Ile, Val or a gap
  UNSURE (18)..(18): Xaa can be any one of Leu, Thr, Ala or a gap
  UNSURE (19)..(19): Xaa can be any one of Arg, Leu or a gap
  UNSURE (20)..(20): Xaa can be any one of Gln, Lys, Leu, Asp, Arg, Glu, His or a gap
  UNSURE (21)..(21): Xaa can be any one of Lys, Ala, Glu, His or a gap
  VARIANT (22)..(22): / replace = "Met" / replace = "Ser" / replace = "Ala"
  VARIANT (23)..(23): / replace = "Ile" / replace = "Ser"
  VARIANT (24)..(24): / replace = "Asp" / replace = "Arg"
  VARIANT (25)..(25): / replace = "Ala" / replace = "Lys" / replace = "Asn" / replace = "Tyr" / replace = "Thr" / replace = "Ile" / replace = "Pro" / replace = "Phe" / replace = "Leu"
  VARIANT (26)..(26): / replace = "Ala" / replace = "Lys" / replace = "Gln" / replace = "Arg"
  VARIANT (27)..(27): / replace = "Phe" / replace = "Asn"
  VARIANT (28)..(28): / replace = "Ser" / replace = "Lys" / replace = "Cys"
  VARIANT (29)..(29): / replace = "Ser" / replace = "Glu"
  VARIANT (30)..(30): / replace = "Pro" / replace = "Val" / replace = "Arg"
  VARIANT (31)..(31): / replace = "Phe" / replace = "Leu"
  VARIANT (32)..(32): / replace = "Asp" / replace = "Trp" / replace = "Val" / replace = "Thr" / replace = "Leu" / replace = "Glu"
  VARIANT (33)..(33): / replace = "Asn" / replace = "Gln" / replace = "Asp"
  VARIANT (34)..(34): / replace = "Thr" / replace = "Val" / replace = "Leu" / replace = "Lys" / replace = "Glu" / replace = "Ser"
  VARIANT (35)..(35): / replace = "Trp" / replace = "Tyr" / replace = "Lys" / replace = "His" / replace = "Asp" / replace = "Ser"
  VARIANT (36)..(36): / replace = "Asn" / replace = "Ala" / replace = "Gly" / replace = "Glu" / replace = "Adp" / replace = "Lys" / replace = "Arg"
  VARIANT (37)..(37): / replace = "Pro" / replace = "Ala" / replace = "Asp" / replace = "Lys" / replace = "Gln" / replace = "Val"
  VARIANT (39)..(39): / replace = "Val" / replace = "Ala" / replace = "Thr"
  VARIANT (40)..(40): / replace = "Phe"
XXXXXXXXXXXXXQXXXXXXXGTERPGTGEYNKFFTEGIY

SEQ ID NO: 181 - protein, 12 aa, Artificial sequence
  Motif 9
  VARIANT (2)..(2): / replace = "Val" / replace = "Ile" / replace = "Arg"
  VARIANT (3)..(3): / replace = "Cys" / replace = "Leu"
  VARIANT (5)..(5): / replace = "Ala" / replace = "Asp" / replace = "Asn" / replace = "Lys" / replace = "Gln" / replace = "Glu"
  VARIANT (6)..(6): / replace = "Ser" / replace = "Ala" / replace = "Leu" / replace = "Asn"
  VARIANT (7)..(7): / replace = "Ala" / replace = "Asp" / replace = "Lys"
  VARIANT (8)..(8): / replace = "Val"
  VARIANT (9)..(9): / replace = "Phe" / replace = "Leu"
  VARIANT (10)..(10): / replace = "Glu" / replace = "Asp" / replace = "Gln" / replace = "Ser" / replace = "Arg"
  UNSURE (11)..(11): Xaa can be Ser or a gap
  VARIANT (12)..(12): / replace = "Ser" / replace = "Lys" / replace = "Asp" / replace = "Ala" / replace = "Ile" / replace = "Leu"
CAGCGTPLYKXT

SEQ ID NO: 182 - protein, 28 aa, Artificial sequence
  Motif 10
  VARIANT (1)..(1): / replace = "Ser"
  VARIANT (2)..(2): / replace = "Tyr"
  VARIANT (3)..(3): / replace = "Tyr" / replace = "Trp" / replace = "Asp"
  VARIANT (4)..(4): / replace = "Gln" / replace = "Asp" / replace = "Arg" / replace = "Ala"
  VARIANT (5)..(5): / replace = "Pro" / replace = "Thr" / replace = "Ala"
  VARIANT (6)..(6): / replace = "Val" / replace = "Leu" / replace = "Phe"
  VARIANT (7)..(7): / replace = "Pro" / replace = "Ala" / replace = "Asp"
  VARIANT (8)..(8): / replace = "Ala" / replace = "Pro" / replace = "Asn" / replace = "Asp" / replace = "Lys" / replace = "Glu"
  VARIANT (9)..(9): / replace = "Asn" / replace = "Thr"
  VARIANT (10)..(10): / replace = "Val" / replace = "His"
  VARIANT (11)..(11): / replace = "Lys" / replace = "Thr" / replace = "Gly" / replace = "Val" / replace = "Ile" / replace = "Ala"
  VARIANT (12)..(12): / replace = "Gln" / replace = "Ser" / replace = "Glu" / replace = "Thr"
  VARIANT (13)..(13): / replace = "Lys" / replace = "His" / replace = "Ile" / replace = "Ala" / replace = "Glu" / replace = "Ser" / replace = "Asn"
  VARIANT (14)..(14): / replace = "Leu" / replace = "Arg" / replace = "Thr" / replace = "Ala" / replace = "Met" / replace = "Val" / replace = "Ile" / replace = "Glu"
  VARIANT (15)..(15): / replace = "Glu" / replace = "Arg" / replace = "Ile" / replace = "Gly" / replace = "Asn"
  VARIANT (16)..(16): / replace = "Leu" / replace = "Ala" / replace = "Asp" / replace = "Arg" / replace = "Trp" / replace = "Met"
  UNSURE (17)..(17): Xaa can be any one of Asp, Glu, Ser, Thr, Ala, Gly or a gap
  UNSURE (18)..(18): Xaa can be any one of Gly, Ile, Ser, Phe, His or a gap
  UNSURE (19)..(19): Xaa can be any one of Arg, Ile, Phe, Pro, Gly, His, Leu, Lys, Met or a gap
  UNSURE (20)..(20): Xaa can be any one of Arg, Phe, Ser, Gly, Met or a gap
  UNSURE (21)..(21): Xaa can be any one of Met, Val, Tyr, Ile, Thr or a gap
  UNSURE (22)..(22): Xaa can be any one of Pro, Arg, Val or a gap
  UNSURE (23)..(23): Xaa can be Arg or a gap
  UNSURE (24)..(24): Xaa can be any one of Gln, Thr or a gap
  UNSURE (25)..(25): Xaa can be any one of Glu, Ala or a gap
  UNSURE (26)..(26): Xaa can be any one of Ile, Val, Ser, Thr or a gap
  UNSURE (27)..(27): Xaa can be any one of Thr, Leu, Ile, Val, His, Asn or a gap
  UNSURE (28)..(28): Xaa can be Cys or a gap
AFFEGIGGAINRTPXXXXXXXXXXXXXX

SEQ ID NO: 183 - protein, 25 aa, Artificial sequence
  Motif 11
  UNSURE (1)..(1): Xaa can be any one of Gly, Ala, Ser, Ile or a gap
  UNSURE (2)..(2): Xaa can be any one of His, Phe or a gap
  UNSURE (3)..(3): Xaa can be any one of Leu, Phe or a gap
  UNSURE (4)..(4): Xaa can be any one of Gly, Phe, Cys or a gap
  VARIANT (5)..(5): / replace = "Phe"
  VARIANT (6)..(6): / replace = "Ile" / replace = "Ser"
  VARIANT (7)..(7): / replace = "Thr" / replace = "His" / replace = "Leu" / replace = "Val"
  VARIANT (8)..(8): / replace = "Asp" / replace = "Pro" / replace = "Met" / replace = "Leu" / replace = "Ile" / replace = "Arg"
  VARIANT (9)..(9): / replace = "Asp" / replace = "Asn" / replace = "Thr" / replace = "Val"
  VARIANT (10)..(10): / replace = "Gly" / replace = "Arg" / replace = "His"
  VARIANT (11)..(11): / replace = "Pro" / replace = "Asn" / replace = "Asp" / replace = "Trp" / replace = "Ser"
  VARIANT (12)..(12): / replace = "Pro" / replace = "His" / replace = "Tyr" / replace = "Ile" / replace = "Asn" / replace = "Arg" / replace = "Ser"
  UNSURE (13)..(13): Xaa can be any one of Ser, Leu, Pro, Ala, Asp, Gly, Lys, Arg or a gap
  UNSURE (14)..(14): Xaa can be any one of Thr, Arg, Asn, Val or a gap
  UNSURE (15)..(15): Xaa can be any one of Pro, Asp, Ala, Phe, Thr or a gap
  VARIANT (16)..(16): / replace = "Leu" / replace = "Phe" / replace = "Ser" / replace = "Arg"
  VARIANT (17)..(17): / replace = "Gly" / replace = "Leu" / replace = "Tyr" / replace = "Asn"
  VARIANT (18)..(18): / replace = "Lys" / replace = "Ala" / replace = "Asn" / replace = "Gln" / replace = "Leu"
  VARIANT (19)..(19): / replace = "Lys" / replace = "Asp" / replace = "Glu" / replace = "Ala" / replace = "Pro"
  VARIANT (20)..(20): / replace = "Tyr" / replace = "Ile" / replace = "Leu" / replace = "Lys" / replace = "Cys" / replace = "Phe"
  UNSURE (21)..(21): Xaa can be any one of Cys, Val or a gap
  UNSURE (22)..(22): Xaa can be any one of Val, Leu, Ile, Ser, Met or a gap
  UNSURE (23)..(23): Xaa can be any one of Asn, Gln, Lys, Leu or a gap
  UNSURE (24)..(24): Xaa can be any one of Ser, Leu, Gln, Arg or a gap
  UNSURE (25)..(25): Xaa can be any one of Val, Ile, Ala, Arg, Tyr or a gap
XXXXHVFKGEGFXXXTDERHXXXXX

SEQ ID NO: 184 - DNA, 52 bp, Artificial sequence
  primer 1
ggggacaagtttgtacaaaaaagcaggcttaaacaatgagctggctcgggaa

SEQ ID NO: 185 - DNA, 49 bp, Artificial sequence
  primer 2
ggggaccactttgtacaagaaagctgggtgttctggttcaaacttgccc

SEQ ID NO: 186 - DNA, 56 bp, Artificial sequence
  primer 3
ggggacaagtttgtacaaaaaagcaggcttaaacaatgggctcttcagcttcttct

SEQ ID NO: 187 - DNA, 53 bp, Artificial sequence
  primer 4
ggggaccactttgtacaagaaagctgggttttgatcatcttacttccttggtt

SEQ ID NO: 188 - DNA, 2194 bp, Oryza sativa
aatccgaaaagtttctgcaccgttttcaccccctaactaacaatatagggaacgtgtgctaaatataaaatgagaccttatatatgtagcgctgataactagaactatgcaagaaaaactcatccacctactttagtggcaatcgggctaaataaaaaagagtcgctacactagtttcgttttccttagtaattaagtgggaaaatgaaatcattattgcttagaatatacgttcacatctctgtcatgaagttaaattattcgaggtagccataattgtcatcaaactcttcttgaataaaaaaatctttctagctgaactcaatgggtaaagagagagattttttttaaaaaaatagaatgaagatattctgaacgtattggcaaagatttaaacatataattatataattttatagtttgtgcattcgtcatatcgcacatcattaaggacatgtcttactccatcccaatttttatttagtaattaaagacaattgacttatttttattatttatcttttttcgattagatgcaaggtacttacgcacacactttgtgctcatgtgcatgtgtgagtgcacctcctcaatacacgttcaactagcaacacatctctaatatcactcgcctatttaatacatttaggtagcaatatctgaattcaagcactccaccatcaccagaccacttttaataatatctaaaatacaaaaaataattttacagaatagcatgaaaagtatgaaacgaactatttaggtttttcacatacaaaaaaaaaaagaattttgctcgtgcgcgagcgccaatctcccatattgggcacacaggcaacaacagagtggctgcccacagaacaacccacaaaaaacgatgatctaacggaggacagcaagtccgcaacaaccttttaacagcaggctttgcggccaggagagaggaggagaggcaaagaaaaccaagcatcctccttctcccatctataaattcctccccccttttcccctctctatataggaggcatccaagccaagaagagggagagcaccaaggacacgcgactagcagaagccgagcgaccgccttctcgatccatatcttccggtcgagttcttggtcgatctcttccctcctccacctcctcctcacagggtatgtgcctcccttcggttgttcttggatttattgttctaggttgtgtagtacgggcgttgatgttaggaaaggggatctgtatctgtgatgattcctgttcttggatttgggatagaggggttcttgatgttgcatgttatcggttcggtttgattagtagtatggttttcaatcgtctggagagctctatggaaatgaaatggtttagggatcggaatcttgcgattttgtgagtaccttttgtttgaggtaaaatcagagcaccggtgattttgcttggtgtaataaagtacggttgtttggtcctcgattctggtagtgatgcttctcgatttgacgaagctatcctttgtttattccctattgaacaaaaataatccaactttgaagacggtcccgttgatgagattgaatgattgattcttaagcctgtccaaaatttcgcagctggcttgtttagatacagtagtccccatcacgaaattcatggaaacagttataatcctcaggaacaggggattccctgttcttccgatttgctttagtcccagaattttttttcccaaatatcttaaaaagtcactttctggttcagttcaatgaattgattgctacaaataatgcttttatagcgttatcctagctgtagttcagttaataggtaatacccctatagtttagtcaggagaagaacttatccgatttctgatctccatttttaattatatgaaatgaactgtagcataagcagtattcatttggattattttttttattagctctcaccccttcattattctgagctgaaagtctggcatgaactgtcctcaattttgttttcaaattcacatcgattatctatgcattatcctcttgtatctacctgtagaagtttctttttggttattccttgactgcttgattacagaaagaaatttatgaagctgtaatcgggatagttatactgcttgttcttatgattcatttcctttgtgcagttcttggtgtagcttgccactttcaccagcaaagttc

SEQ ID NO: 189 - DNA, 51 bp, Artificial sequence
  primer 5
ggggacaagtttgtacaaaaaagcaggcttaaacaatgggcgccgcgccgt

SEQ ID NO: 190 - DNA, 55 bp, Artificial sequence
  primer 6
ggggaccactttgtacaagaaagctgggtactactggggcttaaacttcagagac

SEQ ID NO: 191 - DNA, 53 bp, Artificial sequence
  primer 7
ggggacaagtttgtacaaaaaagcaggcttaaacaatgcaggtcctcgtcgtc

SEQ ID NO: 192 - DNA, 50 bp, Artificial sequence
  primer 8
ggggaccactttgtacaagaaagctgggtgtgcttgagggaagactgact

SEQ ID NO: 193 - DNA, 1341 bp, Oryza sativa
atggcggcgacgatcgtgtccgtcaaggcgcgccagatcttcgacagcaggggcaaccccaccgtcgaggtcgatgtgtgctgctcagatggaacctttgcaagggctgcagttcccagtggtgcatcaactggtgtctatgaagctctcgaattgagggacggtggatctgattacttgggaaagggtgtttccaaggctgtcgacaatgtgaactcggttattgccccagctctgattggcaaggaccctacgtcacaggctgagcttgataacttcatggttcagcagcttgatggaaccaaaaatgagtgggggtggtgcaagcagaagcttggtgctaatgcaatcctggctgtgtcactggccatttgcaaagctggagctatcatcaagaagattcctctgtaccagcacattgccaaccttgctggaaacaagcaactggttttgcccgtacctgcattcaacgtcattaacggtggatcacatgctggaaacaagcttgccatgcaggagttcatgatccttcctactggggccgcttcattcaaggaggccatgaagatgggtgttgaagtgtaccacaacctgaagtctgttatcaagaagaagtatggtcaggatgccaccaatgttggtgatgaaggtggttttgctcctaacattcaggaaaacaaggagggtcttgagctcttgaagactgcaattgaaaaggctggatacactggcaaggttgtcattggaatggatgttgctgcttcggaattctacaatgacaaggacaaaacctatgaccttaacttcaaggaggagaacaatgatggttcacaaaagatatctggtgatagcctgaagaatgtatacaagtcatttgtcagtgaataccccattgtctcgattgaggatccgtttgaccaggatgactgggaacactatgctaagatgaccgctgaaattggagagcaagtgcagattgtcggtgatgacctccttgtcaccaacccaacaagggtggcaaaggcaatccaggagaagtcatgcaatgctcttctgctgaaggttaaccaaattggatctgtcactgagagtattgaggccgtgaagatgtcaaagcgtgctggctggggtgtgatgaccagccacaggagtggtgagactgaggataccttcattgctgatttggctgttggtttggccacgggtcagatcaagactggagcaccctgccgatcagagcgccttgccaaatacaaccagcttcttaggattgaggaggagcttggtgcggctgctgtctacgctggtgccaagttccgcgcacccgtggagccctactaa

SEQ ID NO: 194 - protein, 446 aa, Oryza sativa
MAATIVSVKARQIFDSRGNPTVEVDVCCSDGTFARAAVPSGASTGVYEALELRDGGSDYLGKGVSKAVDNVNSVIAPALIGKDPTSQAELDNFMVQQLDGTKNEWGWCKQKLGANAILAVSLAICKAGAIIKKIPLYQHIANLAGNKQLVLPVPAFNVINGGSHAGNKLAMQEFMILPTGAASFKEAMKMGVEVYHNLKSVIKKKYGQDATNVGDEGGFAPNIQENKEGLELLKTAIEKAGYTGKVVIGMDVAASEFYNDKDKTYDLNFKEENNDGSQKISGDSLKNVYKSFVSEYPIVSIEDPFDQDDWEHYAKMTAEIGEQVQIVGDDLLVTNPTRVAKAIQEKSCNALLLKVNQIGSVTESIEAVKMSKRAGWGVMTSHRSGETEDTFIADLAVGLATGQIKTGAPCRSERLAKYNQLLRIEEELGAAAVYAGAKFRAPVEPY

SEQ ID NO: 195 - DNA, 1338 bp, Oryza sativa
atggcggcgaccatccagagcgtgaaggcccgccagatcttcgacagccgtggcaaccccaccgtcgaggttgatatttgctgctcggatggaacatttgcgagggctgctgtgcctagcggtgcatctactggtgtatatgaagctttggaattgagggatggtggctctgattacttgggaaagggtgtcctcaaggctgttgacaatgtgaactctattattggaccagcattgattggcaaggaccctacagaacagactgtcattgacaacttcatggttcagcaactggatggaaccaaaaacgagtggggctggtgcaagcaaaagcttggtgctaatgctatcctggctgtctcacttgctctatgcaaagccggagctattatcaagaaaattccgttgtatcaacacattgctaaccttgctggtaacaagcaacttgttttgcctgtgcctgctttcaatgtcatcaatggtggatcacatgctggaaacaagctagctatgcaggagttcatgatcctccctactggtgcttcatctttcaaggaggctatgaagatgggtgttgaagtataccataacttaaagtctgttatcaagaagaagtatgggcaagatgctactaatgttggtgatgaaggtggttttgctccaaacattcaggaaaacaaggagggccttgagcttttgaagactgcaattgaaaaggctggatacactggcaaggttgtcattgggatggatgttgctgcttcagagttctacactgaggaccaaacctatgatcttaacttcaaggaagagaacaatgatggttcccagaagatatctggagatagcctgaagaatgtgtacaagtcatttgttagtgaatacccaattgtctcgatcgaagacccatttgatcaggatgactgggttcactatgctaagatgaccgaagaaattggagatcaagtgcagattgttggagatgatctccttgtcaccaacccaactagggtagccaaggcaattaaggacaaggcctgcaatgctcttctccttaaggttaaccaaattggatctgttactgagagcattgaggctgtcaagatgtcaaaacgtgctggctggggtgtgatgaccagtcacaggagtggtgaaactgaggatacattcattgctgatctggcagttggtttatccacgggccagatcaagactggagctccttgcagatctgagcgccttgccaagtacaaccagcttcttaggatcgaggaggagcttggtgctgctgccgtctatgccggagccaaattccgtgcaccagtggagccctactag

SEQ ID NO: 196 - protein, 445 aa, Oryza sativa
MAATIQSVKARQIFDSRGNPTVEVDICCSDGTFARAAVPSGASTGVYEALELRDGGSDYLGKGVLKAVDNVNSIIGPALIGKDPTEQTVIDNFMVQQLDGTKNEWGWCKQKLGANAILAVSLALCKAGAIIKKIPLYQHIANLAGNKQLVLPVPAFNVINGGSHAGNKLAMQEFMILPTGASSFKEAMKMGVEVYHNLKSVIKKKYGQDATNVGDEGGFAPNIQENKEGLELLKTAIEKAGYTGKVVIGMDVAASEFYTEDQTYDLNFKEENNDGSQKISGDSLKNVYKSFVSEYPIVSIEDPFDQDDWVHYAKMTEEIGDQVQIVGDDLLVTNPTRVAKAIKDKACNALLLKVNQIGSVTESIEAVKMSKRAGWGVMTSHRSGETEDTFIADLAVGLSTGQIKTGAPCRSERLAKYNQLLRIEEELGAAAVYAGAKFRAPVEPY

SEQ ID NO: 197 - DNA, 1182 bp, Oryza sativa
atgtctgccttcatctttacatgccgtttgttatttcaacaggctgttgacaatgtgaactctattattggaccagcattgattggcaaggaccctacagaacagactgtcattgacaacttcatggttcagcaactggatggaaccaaaaacgagtggggctggtgcaagcaaaagcttggtgctaatgctatcctggctgtctcacttgctctatgcaaagccggagctattatcaagaaaattccgttgtatcaacacattgctaaccttgctggtaacaagcaacttgttttgcctgtgcctgctttcaatgtcatcaatggtggatcacatgctggaaacaagctagctatgcaggagttcatgatcctccctactggtgcttcatctttcaaggaggctatgaagatgggtgttgaagtataccataacttaaagtctgttatcaagaagaagtatgggcaagatgctactaatgttggtgatgaaggtggttttgctccaaacattcaggaaaacaaggagggccttgagcttttgaagactgcaattgaaaaggctggatacactggcaaggttgtcattgggatggatgttgctgcttcagagttctacactgaggaccaaacctatgatcttaacttcaaggaagagaacaatgatggttcccagaagatatctggagatagcctgaagaatgtgtacaagtcatttgttagtgaatacccaattgtctcgatcgaagacccatttgatcaggatgactgggttcactatgctaagatgaccgaagaaattggagatcaagtgcagattgttggagatgatctccttgtcaccaacccaactagggtagccaaggcaattaaggacaaggcctgcaatgctcttctccttaaggttaaccaaattggatctgttactgagagcattgaggctgtcaagatgtcaaaacgtgctggctggggtgtgatgaccagtcacaggagtggtgaaactgaggatacattcattgctgatctggcagttggtttatccacgggccagatcaagactggagctccttgcagatctgagcgccttgccaagtacaaccagcttcttaggatcgaggaggagcttggtgctgctgccgtctatgccggagccaaattccgtgcaccagtggagccctactag

SEQ ID NO: 198 - protein, 393 aa, Oryza sativa
MSAFIFTCRLLFQQAVDNVNSIIGPALIGKDPTEQTVIDNFMVQQLDGTKNEWGWCKQKLGANAILAVSLALCKAGAIIKKIPLYQHIANLAGNKQLVLPVPAFNVINGGSHAGNKLAMQEFMILPTGASSFKEAMKMGVEVYHNLKSVIKKKYGQDATNVGDEGGFAPNIQENKEGLELLKTAIEKAGYTGKVVIGMDVAASEFYTEDQTYDLNFKEENNDGSQKISGDSLKNVYKSFVSEYPIVSIEDPFDQDDWVHYAKMTEEIGDQVQIVGDDLLVTNPTRVAKAIKDKACNALLLKVNQIGSVTESIEAVKMSKRAGWGVMTSHRSGETEDTFIADLAVGLSTGQIKTGAPCRSERLAKYNQLLRIEEELGAAAVYAGAKFRAPVEPY

SEQ ID NO: 199 - DNA, 1437 bp, Oryza sativa
atgtcggtgcaggagtacctggagaagcacctgctgtcgcgcaagatcgaggaggccgtgaacgcggcggtccgcgccaaggcccccgacccggtgctcttcatctccaaccacatgcgccgggcggcgccggccgtgatcacgagcgtgcgggcgcgccagatcctcgacggccgcggggagcccgccgtggaggtcagcctccacaccaacaaggccgtgcaccgcgcctccgcggccgccgcggacgcccccgagggcgccgccgccgacgccgtcagggacgccgagaagcggaagctgctcgccagggcggtcgccgatgcggtgcgggtgatcaacgacaaggtgtcggaggcgcttgtgggaatggatccgcagcagcagtcgcagatcgaccaggccatcatggacttggacaaggcgcatcacaaggctgagattggagtgaattctatgttggctgtatcaattgcagcttgtaaagcaggtgctgctgaaaaagaggttccattgtacaagcatatagcagaacttgttgggaaaagcgctacgacacttcccatccctgcaattacagtcattaatggaggaacacatgctggaaacagtctccctattcaagaaattatgatccttcctgttggtgccaaaaactttgaagaagcaatgcagatgggttctgagacatatcatcatctgaaggatatcatcttggagaaatatggttcaaacagctgcaacataggtgatgatggtggatttgctccaaatatttccagcataaccgaaggcttggatcttgtcattgaggcaataaatagagctggatataatggaaggatcaagctagcaattgatgtcgccgctaccgatttttgcatgggaaataagtatgacatggagttcaagtttgcagagaaatcagggcagggcttcaaaactgcagatgatttgattgagatttatagccagctttgttcagagtacccacttgtctcaatcgaacagccctttgataaagatgactgggagcattcgaagaagtttaccaccctagagctgtgccaggttgtaggtgatgacttattgatgtcagatcccgaacgcattaagcgggcagtaaatgagtatacctgcaatgctcttgttctcaaggctaatcaagtaggcactgtcacggaagccatagaggttgtgagacaggcaaaggatgctcattggggcgtaatggtgtcacataggtccggggacactgatgattctttcattgctgacttggctgttggtgctgctgctggacagatcaaagcgggtgctccttgccgtggagaatgtctcagtaaatacaatcagctgcttagaatagaggaagaacttggaagtgacggtgtttatgcaggggaaaattggagaaccaccgcaagcacaagctga

SEQ ID NO: 200 - protein, 478 aa, Oryza sativa
MSVQEYLEKHLLSRKIEEAVNAAVRAKAPDPVLFISNHMRRAAPAVITSVRARQILDGRGEPAVEVSLHTNKAVHRASAAAADAPEGAAADAVRDAEKRKLLARAVADAVRVINDKVSEALVGMDPQQQSQIDQAIMDLDKAHHKAEIGVNSMLAVSIAACKAGAAEKEVPLYKHIAELVGKSATTLPIPAITVINGGTHAGNSLPIQEIMILPVGAKNFEEAMQMGSETYHHLKDIILEKYGSNSCNIGDDGGFAPNISSITEGLDLVIEAINRAGYNGRIKLAIDVAATDFCMGNKYDMEFKFAEKSGQGFKTADDLIEIYSQLCSEYPLVSIEQPFDKDDWEHSKKFTTLELCQVVGDDLLMSDPERIKRAVNEYTCNALVLKANQVGTVTEAIEVVRQAKDAHWGVMVSHRSGDTDDSFIADLAVGAAAGQIKAGAPCRGECLSKYNQLLRIEEELGSDGVYAGENWRTTASTS

SEQ ID NO: 201 - DNA, 1341 bp, Oryza sativa
atggcggtgacgatccagtccgtgaaggcgaggcagatcttcgacagccgcgggaaccccacggtggaggtggacgtgggactcagcgatggcagcttcgcgaggggcgccgtgccgagcggtgcttccaccggaatatatgaggccttggagttaagagatggaggatccgactatcttggcaaaggtgtactcaaggctgtgagcaatgtaaacactattattgggccagcactcatcggaaaggatcccactgagcaagttgacattgataacttcatggttcaacagcttgatggaacctccaacaactggggctggtgcaaacaaaagcttggagcaaatgctattcttgctgtttcacttgctgtgtgcaaagcaggagccatggtgaagaagattcccctttaccagcacattgcaaatcttgctggaaacaagactctcgtgctgcctgtacccgctttcaatgtgatcaatggaggatcccatgctggaaacaaacttgccatgcaggagttcatgatcctccctactggtgcatcctctttcaaggaggccatgaagatgggagttgaggtgtaccaccacttgaagagtataatcaagaaaaagtatggccaagatgccacaaatgtgggggatgaaggtggctttgctcctaacattcaggaaaacaaagagggcctcgaactgttgaaggccgcaatagctaaggctggctacacaggcaaagtggtcataggaatggatgttgcagcttctgaattttacagtgaaaaggacaagacttacgatcttaacttcaaggaggataacaacgacggttcacacaaaatttcaggtgacagcctgaaagatgtgtacaagtcctttgtttctgagtaccctattgtgtcgatcgaagatccattcgatcaggatgactgggctacctatgccaagcttactgatgagattggacagcaagtgcagattgttggggatgaccttcttgttactaatcccacaagggttgccaaggcaattagtgaaaagacttgcaatgctcttctcttgaaggtgaatcaaataggctcagttactgagagcattgaggctgttagaatgtccaagcgtgctggatggggagtgatggcaagccataggagtggtgagacagaggataccttcattgctgacctctcagttggtctgtctacgggtcaaattaagacaggagctccctgtcggtcagagcgtctggctaaatacaaccagctgctcaggatagaagaagagctgggcgatgctgcagtttacgctggagaaaaattcagagcccctgtggagccgtactaa

SEQ ID NO: 202 - protein, 446 aa, Oryza sativa
MAVTIQSVKARQIFDSRGNPTVEVDVGLSDGSFARGAVPSGASTGIYEALELRDGGSDYLGKGVLKAVSNVNTIIGPALIGKDPTEQVDIDNFMVQQLDGTSNNWGWCKQKLGANAILAVSLAVCKAGAMVKKIPLYQHIANLAGNKTLVLPVPAFNVINGGSHAGNKLAMQEFMILPTGASSFKEAMKMGVEVYHHLKSIIKKKYGQDATNVGDEGGFAPNIQENKEGLELLKAAIAKAGYTGKVVIGMDVAASEFYSEKDKTYDLNFKEDNNDGSHKISGDSLKDVYKSFVSEYPIVSIEDPFDQDDWATYAKLTDEIGQQVQIVGDDLLVTNPTRVAKAISEKTCNALLLKVNQIGSVTESIEAVRMSKRAGWGVMASHRSGETEDTFIADLSVGLSTGQIKTGAPCRSERLAKYNQLLRIEEELGDAAVYAGEKFRAPVEPY

SEQ ID NO: 203 - DNA, 1440 bp, Oryza sativa
atggcccaccgcctcctcctccccaccaaccccctcctgccccccggcaccggcaccgccaccccgcggcggcgccccgtcgccgccaccgtccgcgcggcgctcgcgacgtcggcggaggaggcgagggcggcgacgggggcggaggtggtgcggtcgatccgggcgaggcagatcgtggacagccgcgggaaccccaccgtggaggtcgacctcgtcgccggggacgggcggctgcaccgctccgcggtgcccagcggcgcatccacggggatctacgaggcgctcgagctccgcgacggggacggggcggcgtacggcgggaagggcgtgctcaacgccgtccgcaacatcaacgaggtcatcgcgcccaagctcgtcggcgtcgacgtcaggaaccagagtgatgttgatgcaatcatgctagacattgatggaactccgaacaagtcaaaattgggtgccaatgctattcttggagtctctttaagcgtatgcagggctggtgctggtgcaaaggaagttcctttatataaacatattcaggagttggctggaacaaaggagcttgtcatgcccgtcccagctttcaatgtaataaatggaggtagccatgcgggcaacaatctggccatgcaggagttcatgcttttacctgtgggagcatcttcattttctgaggctcttcgcatgggtagtgaagtttaccatgccctaaagggcatcattaaggcgaaatatggtcaagatgcatgcaatgttggagatgaaggtggctttgctcctaatgttcaagacaacagagaaggccttgtcttgcttatggatgccattgagaaggcaggctactctggaaagattaaaattggaatggatgttgcagcatcagagtttcttacaaaggatggaagctatgacttaaactttaagaatcagcctaatgatggagctcatgttctttcagcccagcgtctctgtgatctgtacaaagaatttgtcaaggatttccccattgtatcaattgaggaccctttcgatcaagatgactggagctcatgggcatcattgcagtcttcagttaatatccaaattgtgggggatgatttactcgtcacgaacccaaaacgtattgcagaggctattggcaagaaggcttgcaatgctcttttgctgaaggttaatcaaattggcactgtcactgaatcaattcaagctgctcttgattcaaaagctgctggttggggcgtgatggtcagccacaggagtggggaaacggaagataatttcatcgcagatctggctgttggtttagcaagtggtcagatcaaaactggtgctccatgccgtagcgagagactggcaaagtacaatcagcttctgcggatcgaaatggagctaggcaatgtgcgctatgctggggaggcattcaggtctccctaa

SEQ ID NO: 204 - protein, 479 aa, Oryza sativa
MAHRLLLPTNPLLPPGTGTATPRRRPVAATVRAALATSAEEARAATGAEVVRSIRARQIVDSRGNPTVEVDLVAGDGRLHRSAVPSGASTGIYEALELRDGDGAAYGGKGVLNAVRNINEVIAPKLVGVDVRNQSDVDAIMLDIDGTPNKSKLGANAILGVSLSVCRAGAGAKEVPLYKHIQELAGTKELVMPVPAFNVINGGSHAGNNLAMQEFMLLPVGASSFSEALRMGSEVYHALKGIIKAKYGQDACNVGDEGGFAPNVQDNREGLVLLMDAIEKAGYSGKIKIGMDVAASEFLTKDGSYDLNFKNQPNDGAHVLSAQRLCDLYKEFVKDFPIVSIEDPFDQDDWSSWASLQSSVNIQIVGDDLLVTNPKRIAEAIGKKACNALLLKVNQIGTVTESIQAALDSKAAGWGVMVSHRSGETEDNFIADLAVGLASGQIKTGAPCRSERLAKYNQLLRIEMELGNVRYAGEAFRSP

SEQ ID NO: 205 - DNA, 1443 bp, Oryza sativa
atgtctcgcatccatcgaaaccccactttattagcaccaaccccgtctccttcctccattcctccgctgctagaaccttctagaagctctcctcctcctcccatggcggcgacgatcgtgtccgtcaaggcgcgccagatcttcgacagcaggggcaaccccaccgtcgaggtcgatgtgtgctgctcagatggaacctttgcaagggctgcagttcccagtggtgcatcaactggtgtctatgaagctctcgaattgagggacggtggatctgattacttgggaaagggtgtttccaaggctgtcgacaatgtgaactcggttattgccccagctctgattggcaaggaccctacgtcacaggctgagcttgataacttcatggttcagcagcttgatggaaccaaaaatgagtgggggtggtgcaagcagaagcttggtgctaatgcaatcctggctgtgtcactggccatttgcaaagctggagctatcatcaagaagattcctctgtaccagcacattgccaaccttgctggaaacaagcaactggttttgcccgtacctgcattcaacgtcattaacggtggatcacatgctggaaacaagcttgccatgcaggagttcatgatccttcctactggggccgcttcattcaaggaggccatgaagatgggtgttgaagtgtaccacaacctgaagtctgttatcaagaagaagtatggtcaggatgccaccaatgttggtgatgaaggtggttttgctcctaacattcaggaaaacaaggagggtcttgagctcttgaagactgcaattgaaaaggctggatacactggcaaggttgtcattggaatggatgttgctgcttcggaattctacaatgacaaggacaaaacctatgaccttaacttcaaggaggagaacaatgatggttcacaaaagatatctggtgatagcctgaagaatgtatacaagtcatttgtcagtgaataccccattgtctcgattgaggatccgtttgaccaggatgactgggaacactatgctaagatgaccgctgaaattggagagcaagtgcagattgtcggtgatgacctccttgtcaccaacccaacaagggtggcaaaggcaatccaggagaagtcatgcaatgctcttctgctgaaggttaaccaaattggatctgtcactgagagtattgaggccgtgaagatgtcaaagcgtgctggctggggtgtgatgaccagccacaggagtggtgagactgaggataccttcattgctgatttggctgttggtttggccacgggtcagatcaagactggagcaccctgccgatcagagcgccttgccaaatacaaccagcttcttaggattgaggaggagcttggtgcggctgctgtctacgctggtgccaagttccgcgcacccgtggagccctactaa

SEQ ID NO: 206 - protein, 480 aa, Oryza sativa
MSRIHRNPTLLAPTPSPSSIPPLLEPSRSSPPPPMAATIVSVKARQIFDSRGNPTVEVDVCCSDGTFARAAVPSGASTGVYEALELRDGGSDYLGKGVSKAVDNVNSVIAPALIGKDPTSQAELDNFMVQQLDGTKNEWGWCKQKLGANAILAVSLAICKAGAIIKKIPLYQHIANLAGNKQLVLPVPAFNVINGGSHAGNKLAMQEFMILPTGAASFKEAMKMGVEVYHNLKSVIKKKYGQDATNVGDEGGFAPNIQENKEGLELLKTAIEKAGYTGKVVIGMDVAASEFYNDKDKTYDLNFKEENNDGSQKISGDSLKNVYKSFVSEYPIVSIEDPFDQDDWEHYAKMTAEIGEQVQIVGDDLLVTNPTRVAKAIQEKSCNALLLKVNQIGSVTESIEAVKMSKRAGWGVMTSHRSGETEDTFIADLAVGLATGQIKTGAPCRSERLAKYNQLLRIEEELGAAAVYAGAKFRAPVEPY

SEQ ID NO: 207 - DNA, 1341 bp, Zea mays
atggcggcgacgatccaatccgtgaaggcgcgccagatctttgacagccgcggcaaccctacagtcgaggtcgacgtgttttgctcagatggaacctttgcaagggcagctgttcccagtggagcatcaactggtgtatatgaagctctggagttgagggatggtggctctgactatttggggaagggtgtctccaaggctgtgaacaatgtgaattctgttattggacctgctctgattggcaaggaccctacagcacagactgagattgataacttcatggttcaacaacttgatgggaccaaaaatgagtggggatggtgcaagcaaaagcttggtgctaatgcgattctggctgtgtcattagctgtttgcaaagctggggctagcatcaagaggattcctttataccagcacattgccaacctagctgggaacaagcagttagtgttgcctgtccctgcattcaatgtcatcaacggtggttcccatgctggaaacaagcttgctatgcaggagtttatgatccttcctactggagctgcctcatttaaggaggctatgaagatgggtgttgaagtttatcaccacctgaagtccgttatcaaaaagaagtatgggcaagatgccacgaatgttggtgacgaaggtggttttgctccgaacatccaggagaacaaggaaggacttgagctcttgaaaactgcaattgagaaggctggatacactggcaaggttgtcatcggaatggatgttgctgcttcggagttttacagtgacaaggaccaaacctatgacctcaactttaaggaggagaataatgatggttcacagaagatatctggcgatagcttaaagaatgtatacaaatcttttgtgagcgaataccccattgtttcgattgaagatccttttgaccaggatgactgggttcactatgctaagatgactgaagaaattggagagcaagtgcagattgttggtgatgaccttctcgtcaccaaccccactagggttgctaaggctatcaaggagaaatcatgcaatgcccttctgctcaaggttaaccaaatcggatctgtgactgagagtattgaggctgtgaagatgtcaaagcgtgcgggctggggtgtgatgactagtcataggagtggtgagactgaggacactttcattgctgatctggcagttggtttgtccacgggtcagattaagactggagcaccctgcagatcagagcgtcttgccaaatacaaccagcttcttaggattgaagaagagcttggcgctattgctgtctacgcaggtgccaaattccgtgcacctgtggagccctactaa

SEQ ID NO: 208 - protein, 446 aa, Zea mays
MAATIQSVKARQIFDSRGNPTVEVDVFCSDGTFARAAVPSGASTGVYEALELRDGGSDYLGKGVSKAVNNVNSVIGPALIGKDPTAQTEIDNFMVQQLDGTKNEWGWCKQKLGANAILAVSLAVCKAGASIKRIPLYQHIANLAGNKQLVLPVPAFNVINGGSHAGNKLAMQEFMILPTGAASFKEAMKMGVEVYHHLKSVIKKKYGQDATNVGDEGGFAPNIQENKEGLELLKTAIEKAGYTGKVVIGMDVAASEFYSDKDQTYDLNFKEENNDGSQKISGDSLKNVYKSFVSEYPIVSIEDPFDQDDWVHYAKMTEEIGEQVQIVGDDLLVTNPTRVAKAIKEKSCNALLLKVNQIGSVTESIEAVKMSKRAGWGVMTSHRSGETEDTFIADLAVGLSTGQIKTGAPCRSERLAKYNQLLRIEEELGAIAVYAGAKFRAPVEPY

SEQ ID NO: 209 - DNA, 1341 bp, Zea mays
atggcggtcacgatcacgtgggtgaaggcgaggcagatcttcgacagccgcggcaaccccaccgtcgaggtggacgtgggcctcagcgacggcagctacgcgaggggggccgtacccagcggcgcatccactggaatatatgaggccttggagttgagggatggaggatctgattatcttggcaagggtgttcttaaggctgtcagcaatgtaaataacattattggaccagcaattgttggaaaggaccccactgagcaggttgagattgacaacttcatggtccaacagcttgatggaacctccaatgagtggggctggtgcaaacagaagcttggagcaaatgccatccttgcggtttcacttgctgtgtgcaaagctggagctatggtgaagaagattcctctttaccagcacatcgcaaatcttgctgggaacaaaactctggtgctccctgtacctgcctttaatgtgattaatggagggtcacatgctggaaacaagcttgccatgcaggagttcatgatcctcccaactggtgcctcctcgttcaaggaggccatgaagatgggagttgaggtgtaccacaacctgaagagcataatcaagaagaagtacggtcaggatgcgacaaacgttggggatgaaggtggttttgcacctaacattcaggaaaacaaagaaggccttgaactattgaaggcagccatagaaaaggctggctacactggaaaggtggtcattggaatggatgttgctgcttctgagttcttcggtgagaaagacaagacttatgatcttaatttcaaggaggagaacaacgatggctcaaacaaaatttcaggcgacagcctgaaagacctgtacaagtcctttgtttctgagtaccctatcgagtcgatcgaagacccatttgatcaggatgactggagcacttatgccaaactcactgatgagattggacagaaagtgcagattgtaggagatgatcttctcgttaccaaccccaccagggtcgccaaggccatcaatgagaagacctgcaatgctctcctcttgaaggtgaaccaaatcgggtctgtgaccgagagtatcgaagctgtcaggatgtccaagcgcgccggatggggagtgatggcaagccacaggagtggcgagacagaggacaccttcattgctgacctctcagttggcctgtctacgggccaaatcaagacgggagctccttgccggtctgagcgcctggccaaatacaaccagctgctcaggatcgaggaagagctcggtgatgccgcggtctacgccggagcaaagttcagggcaccagtggagccctactaa

SEQ ID NO: 210 - protein, 446 aa, Zea mays
MAVTITWVKARQIFDSRGNPTVEVDVGLSDGSYARGAVPSGASTGIYEALELRDGGSDYLGKGVLKAVSNVNNIIGPAIVGKDPTEQVEIDNFMVQQLDGTSNEWGWCKQKLGANAILAVSLAVCKAGAMVKKIPLYQHIANLAGNKTLVLPVPAFNVINGGSHAGNKLAMQEFMILPTGASSFKEAMKMGVEVYHNLKSIIKKKYGQDATNVGDEGGFAPNIQENKEGLELLKAAIEKAGYTGKVVIGMDVAASEFFGEKDKTYDLNFKEENNDGSNKISGDSLKDLYKSFVSEYPIESIEDPFDQDDWSTYAKLTDEIGQKVQIVGDDLLVTNPTRVAKAINEKTCNALLLKVNQIGSVTESIEAVRMSKRAGWGVMASHRSGETEDTFIADLSVGLSTGQIKTGAPCRSERLAKYNQLLRIEEELGDAAVYAGAKFRAPVEPY

SEQ ID NO: 211 - DNA, 1671 bp, Zea mays
atggcacgcgagccccacctgccacctccgatccgtcgcctccaccaaccccgccttattcaaaaaatttattcgccgaaaccccttgccaatgccacctcgccgcctccgcccgacccagcaaaaaggcacgacgacctctacctctacctcgccgccaccgtcaccgtggcccgccgccatataagtaaaccctcgcctcgtcctcctcccaggctcgccaccctccgcctccgacacatggcccacccgcacctcgtgctcccctccccgaagtccctcctccccgccgccgcaactccatcgcgccgcgccgtcgccatccgcgcggcgatctccaccgctttgtctccggccaaggcggcagctggagcagaggcggtgcgatcgatccgcgcgcggcagatcgtggacagccgcgggaaccccaccgtcgaggtcgacctcgtcgccggggacggacgcctccaccgctccgcggtgcccagcggggcgtccacggggatctacgaggcgctggagctccgcgacggtgacaaggccgtatacggcgggaagggcgtactccaagctgtgcgcaacatcaacgaggttatcgcgcctaagctcataggcgtcgatgtgaggaaccaaagcgatgttgatgcagtcatgctagacattgatggaactcagaataaatcgaagttgggtgccaatgctattctcggagtctccttgagtgtatgtagggcaggcgctggtgcaaagggagttcctctgtataaacatattcaggagctagcaggaattaaggagcttgtcatgcctgttcctgcttttaatgtaataaatggaggtagccatgctggcaacaatctggccatgcaggagttcatgattttacctgttggagcaactacatttgctgaagctcttcgtatgggcagcgaagtttaccatgtcctgaagagcatcattaagtcaaaatatggtcaagatgcatgcaatgtcggagatgaaggaggttttgctcctaatgttcaagacaacagagagggtcttatcttgcttatggatgccattgagaaggcaggctacactggaatgatcaaaattggaatggatgttgcggcatcagagttccttacaaaggatgggaactatgatctaaactttaagaatcagcctaatgatggagtccatgttctttcagcccagcatctgggtgatctgtacagagattttgtcaaggatttccctattgtatcaattgaggacccttttgatcaggatgactggagttcatgggcatcattgcagtcctcagttggtatccaaattgtgggtgatgatttacttgtcacaaacccaaaacgaattgcagacgctattgacaggaaggcttgcaatgctcttttattaaaggtcaaccagattggtactgtcactgaatcaattcaagctgccctggattcaaaagctgctggttggggtgtgatggtcagccacagaagtggtgaaaccgaagacaacttcatcgcagatttggctgttggcttagcaagtgggcagattaaaactggggctccatgccgcagcgagaggctggccaaatacaatcagcttttgcggattgaagaggggcttggcaacgtgcgctatgcaggggaggcattcaggtctccataa

SEQ ID NO: 212 - protein, 556 aa, Zea mays
MAREPHLPPPIRRLHQPRLIQKIYSPKPLANATSPPPPDPAKRHDDLYLYLAATVTVARRHISKPSPRPPPRLATLRLRHMAHPHLVLPSPKSLLPAAATPSRRAVAIRAAISTALSPAKAAAGAEAVRSIRARQIVDSRGNPTVEVDLVAGDGRLHRSAVPSGASTGIYEALELRDGDKAVYGGKGVLQAVRNINEVIAPKLIGVDVRNQSDVDAVMLDIDGTQNKSKLGANAILGVSLSVCRAGAGAKGVPLYKHIQELAGIKELVMPVPAFNVINGGSHAGNNLAMQEFMILPVGATTFAEALRMGSEVYHVLKSIIKSKYGQDACNVGDEGGFAPNVQDNREGLILLMDAIEKAGYTGMIKIGMDVAASEFLTKDGNYDLNFKNQPNDGVHVLSAQHLGDLYRDFVKDFPIVSIEDPFDQDDWSSWASLQSSVGIQIVGDDLLVTNPKRIADAIDRKACNALLLKVNQIGTVTESIQAALDSKAAGWGVMVSHRSGETEDNFIADLAVGLASGQIKTGAPCRSERLAKYNQLLRIEEGLGNVRYAGEAFRSP

SEQ ID NO: 213 - DNA, 1341 bp, Hordeum vulgare
atggccgccacgatccagtccgtcaaggcccgccagatcttcgacagccgcggcaaccccaccgtcgaggttgatgtgtgctgctcagatggaaccttcgccagggccgccgttcccagcggtgcatcaactggtgtttatgaagctttggaactgagggacggtggatctgactacttgggaaagggtgtttcgaaggctgtcgacaatgtgaactcgattatcgcgccagctttgattggcaaggaccctacagctcaaactgagctcgacaactttatggttcagcagcttgatggaaccaaaaacgagtggggttggtgcaagcagaagctcggtgctaatgctatcctggctgtgtcactagctgtttgcaaagctggagccagcgtcaagaagattccgctgtaccagcacattgccaaccttgctggcaacaagcaattggttttgcctgttcctgcattcaatgttatcaatggtggttcccatgctggaaacaagcttgctatgcaggagttcatgattcttcctactggagctgcctcattcaaggaggcaatgaagatgggcgttgaagtgtaccacaacttgaagtctgttatcaagaagaagtatgggcaggatgccaccaatgttggagatgaaggtggttttgctcctaacattcaggagaacaaggagggccttgagctcttgaagactgcaattgaaaaggctggatacaccggcaaggttgtcattggaatggacgttgctgcttcagagttctacaatgacaaggacaaaacctatgacctcaacttcaaggaagagaacaacgatggttcccagaagatatctggagatagcctgaagaacgtatacaagtcattcgtgagtgagtaccctattgtgtcgattgaggacccatttgaccaggatgactgggttcactatgctaagatgactgaggaatgcggagagcaagttcagattgttggtgatgaccttctagtcaccaacccaaccagagttgcgaaggctatccaggagaagtcatgcaatgctcttctgctgaaggttaaccaaattggatccgtcactgagagtatcgaggctgtgaagatgtcaaagcatgctggctggggtgtgatgaccagtcacaggagtggtgagactgaggacacattcattgctgatttggctgttggtttgtccacgggtcagatcaagaccggggctccctgccgctcagagcggcttgccaagtacaaccagcttctgaggatcgaggaggagctaggcgctgccgctgtgtatgccggcctcaagttccgtgcaccggtggagccatactag

SEQ ID NO: 214 - protein, 446 aa, Hordeum vulgare
MAATIQSVKARQIFDSRGNPTVEVDVCCSDGTFARAAVPSGASTGVYEALELRDGGSDYLGKGVSKAVDNVNSIIAPALIGKDPTAQTELDNFMVQQLDGTKNEWGWCKQKLGANAILAVSLAVCKAGASVKKIPLYQHIANLAGNKQLVLPVPAFNVINGGSHAGNKLAMQEFMILPTGAASFKEAMKMGVEVYHNLKSVIKKKYGQDATNVGDEGGFAPNIQENKEGLELLKTAIEKAGYTGKVVIGMDVAASEFYNDKDKTYDLNFKEENNDGSQKISGDSLKNVYKSFVSEYPIVSIEDPFDQDDWVHYAKMTEECGEQVQIVGDDLLVTNPTRVAKAIQEKSCNALLLKVNQIGSVTESIEAVKMSKHAGWGVMTSHRSGETEDTFIADLAVGLSTGQIKTGAPCRSERLAKYNQLLRIEEELGAAAVYAGLKFRAPVEPY

SEQ ID NO: 215 - DNA, 1338 bp, Glycine max
atggcaacgatcaaggccgtgaaagctcgccagatcttcgacagccgtggaaatccaaccgtcgaagttgacgttattctcagcgatggaagcttccacagagccgccgtgcctagcggtgcttcaacaggtgtttatgaggctttggaattaagggatggaggctcagactacctcgggaaaggtgttctcaaggctgtggagaatgttaattcaattatagcacctgctctgcttggcaaggacccaacgaagcagactgaaattgacaattttatggtacagcagcttgatggaactgttaatgaatgggggtggtgcaagcagaagcttggagccaatgctattttggcagtgtcacttgctgtctgcaaggctggtgctgcagtgaagaaaattcctctgtacaagcacattgccaatctggctggaaacaagactttggtactgcctgtaccttcattcaatgttatcaatggaggctcacatgctggaaataagctagcaatgcaggaatttatgattctccctgttggggcatcttccttcaaagaagccatgaaaatgggcgtagaagtataccatcatctaaaggctgttattaaaaagaaatacggtcaggatgctactaacgttggtgatgaaggtggctttgctcctaatatccaggaaaaccaagaaggtcttgagcttctgaagactgccattgccaaagctggttacactggaaaggttgtaattgggatggatgttgctgcttcagaattttatgataacaaggacaaaacctatgacttgaattttaaggaagagaataatgatggatcacagaaaatctcaggagacagcttaaagaatgtgtacaaatcatatgtgacagattatccaattgtgtccattgaggatccatttgatcaggatgactgggagcactatgcaaaattaacagctgaagttggccagcaagtgcagattgttggtgatgatctccttgtcaccaacccgaagcgggtggagaaagcaatcaaggagaaggcttgcaatgcccttctgttgaaggtgaatcaaattggtagtgtaactgaaagtattgaagctgtgagaatgtctaaacaagctggttggggtgtcatggctagccacaggagtggtgaaactgaggataccttcattgctgacctctcagttggattagcaactggtcagatcaagactggagctccctgccgatctgaaaggcttgccaagtacaaccagctcctgaggattgaggaggaactgggttctgcggctgtctatgctggtgccaaattcagagccccagtggaaccctattga

SEQ ID NO: 216 - protein, 445 aa, Glycine max
MATIKAVKARQIFDSRGNPTVEVDVILSDGSFHRAAVPSGASTGVYEALELRDGGSDYLGKGVLKAVENVNSIIAPALLGKDPTKQTEIDNFMVQQLDGTVNEWGWCKQKLGANAILAVSLAVCKAGAAVKKIPLYKHIANLAGNKTLVLPVPSFNVINGGSHAGNKLAMQEFMILPVGASSFKEAMKMGVEVYHHLKAVIKKKYGQDATNVGDEGGFAPNIQENQEGLELLKTAIAKAGYTGKVVIGMDVAASEFYDNKDKTYDLNFKEENNDGSQKISGDSLKNVYKSYVTDYPIVSIEDPFDQDDWEHYAKLTAEVGQQVQIVGDDLLVTNPKRVEKAIKEKACNALLLKVNQIGSVTESIEAVRMSKQAGWGVMASHRSGETEDTFIADLSVGLATGQIKTGAPCRSERLAKYNQLLRIEEELGSAAVYAGAKFRAPVEPY

SEQ ID NO: 217 - DNA, 1335 bp, Glycine max
atggctaccatcgttagcatcaaggcccgccagatcttcgacagtcgtggcaatccaactgtcgaggtggatttgacttgctccgatggtacttttgccagagctgctgttccaagtggtgcatccactgggatttatgaggcccttgaattgagagatggaggatctgactaccttggaaagggtgtatcaaaggctgttgacaatgtgaacaccgtcattggccctgctttgattggcaaggacccaactgagcagactgctattgacaacttaatggttcaacagcttgatggaactgttaacgaatggggttggtgcaagcaaaagctaggagcaaatgccatattggcagtgtctcttgcagtctgcaaagctggtgctagcgtcctgaaaattcctctttacaagcatattgcaaatatcgcgggtaacaaaaagttggttttgcctgttcctgctttcaatgtcattaatggtggatcacatgctggaaacaaacttgctatgcaggagtttatggttcttcccgtgggagcttcctctttcaaggaagccatgaagatgggtgtagaagtatatcacaatttgaagtctgtgattaagaagaaatatggtcaagatgcagtaaatgttggtgacgaaggtggctttgcccctaacatccaggaaaacaaggaaggtttggaattgctgaaaactgccattgccaaagctggttacacaggcaaagttgtcattggaatggatgttgcagcttctgaattctacaaggaagataaaacatacgatttgaacttcaaggaagataacaatgatggctcccagaggatctctggagatgctttgaaagatctgtacaagtcatttgtgtcagagtacccaattgtttcaattgaggatccatttgaccaggatgactgggagcactatgctaagctaactgctgaggttggagccaatgtacaaattgttggtgatgatctcttggttaccaaccccaagagggttcagaaggcaattgatactaaagcatgcaatgctcttctcctcaaggtcaaccaaattggttctgtgactgagagtattgaagctgtcaggatgtccaaaaaagctggatggggtgtcatggccagtcacagaagtggagagactgaggataccttcattgctgacctttctgttggtttggctacgggtcaaattaagactggagctccatgcaggtctgagcgtcttgctaaatataaccagctcttgagaattgaggaggagcttggtgctgaagcagtgtacgccggagctaacttccgtacccccgttgaaccctactaa

SEQ ID NO: 218 - protein, 444 aa, Glycine max
MATIVSIKARQIFDSRGNPTVEVDLTCSDGTFARAAVPSGASTGIYEALELRDGGSDYLGKGVSKAVDNVNTVIGPALIGKDPTEQTAIDNLMVQQLDGTVNEWGWCKQKLGANAILAVSLAVCKAGASVLKIPLYKHIANIAGNKKLVLPVPAFNVINGGSHAGNKLAMQEFMVLPVGASSFKEAMKMGVEVYHNLKSVIKKKYGQDAVNVGDEGGFAPNIQENKEGLELLKTAIAKAGYTGKVVIGMDVAASEFYKEDKTYDLNFKEDNNDGSQRISGDALKDLYKSFVSEYPIVSIEDPFDQDDWEHYAKLTAEVGANVQIVGDDLLVTNPKRVQKAIDTKACNALLLKVNQIGSVTESIEAVRMSKKAGWGVMASHRSGETEDTFIADLSVGLATGQIKTGAPCRSERLAKYNQLLRIEEELGAEAVYAGANFRTPVEPY

SEQ ID NO: 219 - DNA, 1434 bp, Arabidopsis thaliana
atggctttgactacaaaacctcaccatcttcagagatctttcctctctccgtcgcgtgtttccggcgaacgatatttggaatctgcgccatcatgtctgagattccgtcgcagcggtgtccaatgctcggtggtggctaaggagtgcagagtgaaaggagtgaaagcgagacagattattgatagtagagggaatccgacggtggaggttgatctgattaccgatgatctgtatcgttcggctgttccaagtggtgcatctaccgggatctacgaagcgcttgagcttagagatggagacaagagcgtctatggtggtaaaggtgtattacaggctattaaaaacatcaatgaacttgtggctccaaaactcattggagttgacgttaggaaccaagctgatgtcgatgctcttatgctggaactggatgggaccccaaacaagtcgaaactcggggctaatgcgatattaggagtgtcattgagcgtttgcagggcaggtgctggagctaaaggagtgcctttgtacaaacacatccaggaaacatcaggaacaaaggagcttgtcatgccagttcctgcattcaatgtgatcaatggaggcagtcatgctgggaatagtttggctatgcaagagtttatgatactacctgtaggagctacctcattctcggaggccttccagatgggaagtgaagtttatcatacattgaaggggataatcaaaactaagtatggtcaagatgcttgtaatgtcggagatgaaggagggtttgcgccgaatgttcaagataacagagagggactagttctgctcatagatgcaattgaaaaggccggttacactggaaagatcaaaataggaatggatgttgctgcatcagaatttttcatgaaagatggtagatacgatttgaacttcaagaaacagccaaacgatggagctcacgtactgtcagccgagagtcttgctgacctctacagagaattcatcaaggatttcccaattgtctctatcgaagatccttttgaccaggatgattggagctcatgggcttcattgcaatcctctgtggatatccaactcgtgggagatgacttgttagtcactaacccgaagaggatagctgaagctattaagaaacagtcttgcaatgctctactcttgaaggttaaccagattgggacagtcactgagtcaattcaagcagcacttgactcaaaagctgcaggctggggtgtgatggttagtcacaggagtggcgagacagaggataacttcatcgcagatctctctgttggtttagcaagcggacagatcaaaactggtgctccatgccgaagtgaacgattgtcaaaatacaaccagcttctccgtatcgaagaggaactcggcaatgtgcgctacgccggtgaagctttccgatcaccatga

SEQ ID NO: 220 - protein, 477 aa, Arabidopsis thaliana
MALTTKPHHLQRSFLSPSRVSGERYLESAPSCLRFRRSGVQCSVVAKECRVKGVKARQIIDSRGNPTVEVDLITDDLYRSAVPSGASTGIYEALELRDGDKSVYGGKGVLQAIKNINELVAPKLIGVDVRNQADVDALMLELDGTPNKSKLGANAILGVSLSVCRAGAGAKGVPLYKHIQETSGTKELVMPVPAFNVINGGSHAGNSLAMQEFMILPVGATSFSEAFQMGSEVYHTLKGIIKTKYGQDACNVGDEGGFAPNVQDNREGLVLLIDAIEKAGYTGKIKIGMDVAASEFFMKDGRYDLNFKKQPNDGAHVLSAESLADLYREFIKDFPIVSIEDPFDQDDWSSWASLQSSVDIQLVGDDLLVTNPKRIAEAIKKQSCNALLLKVNQIGTVTESIQAALDSKAAGWGVMVSHRSGETEDNFIADLSVGLASGQIKTGAPCRSERLSKYNQLLRIEEELGNVRYAGEAFRSP

SEQ ID NO: 221 - DNA, 1428 bp, Arabidopsis thaliana
atgtctgtgcaagagtatttagacaagcatatgctttctcggaaaatcgaagacgccgttaatgccgccgtaagggctaaaacctcagatcccgttctcttcatcgctaatcatctgaagaaagctgtatcatctgtgataacgaaggttaaagcacgacagatccttgacagcagaggaattccaacagttgaagttgatctgcacacgaacaaaggcgtttttcgtgcttctgttcccagtggtgattcttctggaacgtatgaagctattgagctacgtgatggagacaaaggaatgtatcttggaaacagtgtggctaaagctgttaagaacataaatgaaaaaatttctgaggcgttgattggtatggacccaaaacttcagggtcagatagatcaggctatgatagatttggataaaactgaaaagaagagtgaacttggtgctaatgctatacttgctgtgtcaattgcggcatgcaaggctggagctgctgagaaagaggtccctttgtgcaagcatctttctgatcttagtggcagagcaaacatggtgttacctgtacctgcgttcactgttttgagtggtgggaagcatgcttcgaatacttttgccattcaggaaattatgattctcccaattggagcaagtagatttgaggaggccctgcaatggggatctgagacatatcatcatttaaaggctgtcatttcagaaaagaatggtggtttgggatgtaatgttggtgaagatggtggtcttgctccagatatctcgagcctcaaggaaggtttggagcttgtaaaagaagctatcaaccgaacagggtacaatgataagataaagatagccattgatattgccgccactaatttttgtttaggtaccaagtatgatttagatatcaagtctccaaataaatctgggcaaaatttcaagtcagcggaagatatgatagatatgtacaaagaaatttgtaatgattatccaattgtgtctatagaagacccttttgacaaggaggactgggaacacaccaagtatttttcgagtcttggaatatgtcaggtggtaggtgacgatttgttgatgtcaaattcaaaacgagttgagcgtgccatacaggagtcttcttgtaatgctcttcttctcaaggtgaatcagattggtacagtaacagaagccattgaagtagtgaaaatggcaagggatgcccagtggggtgtggtgacatctcatagatgtggagaaacagaggactctttcatctctgacttatctgtgggtctcgcaacaggtgtgattaaagctggtgctccttgcagaggagaacgtactatgaagtataaccagttgctacggatagaggaagagcttggggatcaagcagtgtatgctggagaagattggaagctatctctctaa

SEQ ID NO: 222 - protein, 475 aa, Arabidopsis thaliana
MSVQEYLDKHMLSRKIEDAVNAAVRAKTSDPVLFIANHLKKAVSSVITKVKARQILDSRGIPTVEVDLHTNKGVFRASVPSGDSSGTYEAIELRDGDKGMYLGNSVAKAVKNINEKISEALIGMDPKLQGQIDQAMIDLDKTEKKSELGANAILAVSIAACKAGAAEKEVPLCKHLSDLSGRANMVLPVPAFTVLSGGKHASNTFAIQEIMILPIGASRFEEALQWGSETYHHLKAVISEKNGGLGCNVGEDGGLAPDISSLKEGLELVKEAINRTGYNDKIKIAIDIAATNFCLGTKYDLDIKSPNKSGQNFKSAEDMIDMYKEICNDYPIVSIEDPFDKEDWEHTKYFSSLGICQVVGDDLLMSNSKRVERAIQESSCNALLLKVNQIGTVTEAIEVVKMARDAQWGVVTSHRCGETEDSFISDLSVGLATGVIKAGAPCRGERTMKYNQLLRIEEELGDQAVYAGEDWKLSL

SEQ ID NO: 223 - DNA, 1335 bp, Arabidopsis thaliana
atggctactatcaccgttgttaaggctagacagatcttcgacagtcgtggtaatcccaccgttgaggttgatatccacacgtcaaatggtattaaggttacagcagctgttccaagtggagcttccactggtatctatgaggctcttgagctgagggatggaggatctgactaccttggaaagggtgtatctaaggctgttggcaatgtgaacaacatcatcgggccagcacttattggaaaggacccaactcagcagactgctattgacaacttcatggtccatgaacttgacggaacccaaaacgagtgggggtggtgcaagcaaaagcttggagccaatgcgattcttgctgtgtctcttgctgtctgcaaagctggggctgttgtcagcggcattcctctatacaagcacattgccaaccttgctggtaaccccaagattgtgctaccagttcctgccttcaacgtcatcaatggtggatcccatgccggaaacaagcttgctatgcaggagtttatgatcctccctgttggagctgcttctttcaaggaagccatgaagatgggtgtggaagtttaccaccacttgaagtctgtgattaagaagaagtacggccaggatgccacaaatgttggtgatgaaggtgggtttgcaccaaacattcaggagaacaaggagggtcttgaattgctcaagactgctatcgagaaggctggatacactggaaaggttgtcattggaatggatgttgccgcttcagagttctactcagaagacaagacctacgacttgaacttcaaagaagagaacaacaatggctctcagaagatttctggtgatgctctaaaggacctgtacaagtcctttgtcgctgagtacccaatcgtgtccattgaggacccatttgaccaagatgactgggagcactatgctaagatgaccactgagtgtggaaccgaggttcagattgtcggtgatgatttgttggtcactaaccccaagagagttgctaaggcaatcgcagagaagtcttgcaatgctcttcttttgaaggttaaccaaatcggatctgtaaccgagagtatcgaggcagttaagatgtcgaagaaagcaggttggggagtgatgaccagccacagaagtggtgaaaccgaggacacattcattgctgacttagccgttggcttgtccactggacaaatcaaaaccggtgctccttgcagatccgagcgtcttgccaagtacaaccagcttttgcgtattgaggaggagttgggatcagaggcaatttacgctggagtcaacttccgcaaacctgtggaaccctactaa

SEQ ID NO: 224 - protein, 444 aa, Arabidopsis thaliana
MATITVVKARQIFDSRGNPTVEVDIHTSNGIKVTAAVPSGASTGIYEALELRDGGSDYLGKGVSKAVGNVNNIIGPALIGKDPTQQTAIDNFMVHELDGTQNEWGWCKQKLGANAILAVSLAVCKAGAVVSGIPLYKHIANLAGNPKIVLPVPAFNVINGGSHAGNKLAMQEFMILPVGAASFKEAMKMGVEVYHHLKSVIKKKYGQDATNVGDEGGFAPNIQENKEGLELLKTAIEKAGYTGKVVIGMDVAASEFYSEDKTYDLNFKEENNNGSQKISGDALKDLYKSFVAEYPIVSIEDPFDQDDWEHYAKMTTECGTEVQIVGDDLLVTNPKRVAKAIAEKSCNALLLKVNQIGSVTESIEAVKMSKKAGWGVMTSHRSGETEDTFIADLAVGLSTGQIKTGAPCRSERLAKYNQLLRIEEELGSEAIYAGVNFRKPVEPY

SEQ ID NO: 225 - DNA, 1419 bp, Populus trichocarpa
atgacgattactattgtctccgtcaaggcaaggcagatcttcgacagccgtggcaatccaaccgtcgaggctgatgtgacaacatccgatggcgttttgtcaagagctgccgttcctagcggtgcatccactggcgtttacgaggcccttgaacttagggatggaggctcagattatcttggaaagggtgtttccaaggctgttgggaatgtcaatacaattattgggcctgcattgattggcaaggacccaactgagcaggtcgctattgataacttgatggttcaacaacttgatggaactgtaaatgagtggggctggtgcaaacaaaagcttggagcaaatgccatcttggcagtttctcttgctgtttgcaaagctggggcccatgccaagggtatacccctttataagcacattgccaaccttgctggtaacaagaacttggtgctgccagttcctgctttcaatgtcatcaacggtggatcacatgccggaaataaacttgctatgcaggcacgcattttgatatttcatctaatttacttttcaaggatgctgcttgaattcgagtttctgactttgtttcatctgcaggagttcatgattcttccaacgggagcttcctctttcaaagaggccatgaagatgggagctgaagtataccatcatttgaagtccgtgattaagaagaagtacggtcaggatgcaacaaatgttggtgatgaaggtggttttgctcccaacattcaggataaccaggaaggacttgaattgctcaagactgccattgctaaagctggttacacaggcaaagtggttattggaatggatgttgctgcctctgaattttatggagcagataaaacatatgaccttaacttcaaagaagagaacaatgatggttcaaaaaagatcacaggtgatgctctcaaggacctctacaagtctttcgtgtccgagtaccctattgtatcgattgaagatccatttgaccaagatgactgggaacactatgcaaagttaactgctgaaatcggagagaaagtacaaattgtgggagatgatctcttggtcaccaatcccaagagggttgagaaggctatcaaagagaaagcttgtaatgccctcctcctcaaggttaatcaaattggatctgttactgagagcattgaagctgtaaagatgtccaagcaagctggatggggagtgatggccagccaccgcagtggtgaaacagaggatactttcattgctgatttgtcagtgggtttggccacgggccaaataaagactggagcaccttgcaggtccgagcggcttgctaaatataaccagatcttgcgaattgaggaagagcttggcgcagaagcggtctatgccggagcaaacttcaggagacctgtcgaaccctattag

SEQ ID NO: 226 - protein, 472 aa, Populus trichocarpa
MTITIVSVKARQIFDSRGNPTVEADVTTSDGVLSRAAVPSGASTGVYEALELRDGGSDYLGKGVSKAVGNVNTIIGPALIGKDPTEQVAIDNLMVQQLDGTVNEWGWCKQKLGANAILAVSLAVCKAGAHAKGIPLYKHIANLAGNKNLVLPVPAFNVINGGSHAGNKLAMQARILIFHLIYFSRMLLEFEFLTLFHLQEFMILPTGASSFKEAMKMGAEVYHHLKSVIKKKYGQDATNVGDEGGFAPNIQDNQEGLELLKTAIAKAGYTGKVVIGMDVAASEFYGADKTYDLNFKEENNDGSKKITGDALKDLYKSFVSEYPIVSIEDPFDQDDWEHYAKLTAEIGEKVQIVGDDLLVTNPKRVEKAIKEKACNALLLKVNQIGSVTESIEAVKMSKQAGWGVMASHRSGETEDTFIADLSVGLATGQIKTGAPCRSERLAKYNQILRIEEELGAEAVYAGANFRRPVEPY

SEQ ID NO: 227 - DNA, 1599 bp, Populus trichocarpa
atgtcggtgcaggaatacctagacaagcacgtgctctctcgtaaaatcgaagacgccgtcaatgccgccgtcagggccaaaactcccgatcctgttctcttcatatcaaatcacatgagaaaagcggttccgtcagtgataacgaaaataaaagggaggcagatcctggatagcagaggaattcctactgttgaagttgacttgttcaccaacaaaggcagcttccgtgcttctgttcctagcggtcatgttactggcatgtatgaagctgtagaactgagagatggggacaaaggaatgtatctcggaaacagtgtgactagagctgttaagaacattaatgagaagatatctgaagcactgattggcatggacccgacacttcagtctcaaattgatcaggctatgatagacttggacaaaacagaaaagaagggtgaacttggagcaaatgctatgttagctgtgtcaattgctgcatgcaaagctggagccgctgaaaaggaggcatgagttccactttacaaacacatttctgatctttccagcaaaaccaacccgactcttcctgtcccagccttcactgtcataagtggtggaaaacatgctgggaacaatctagccattaaggaaatcatgattcttccaattggagccagcacatttgaggaggcactacaaatgggttccgaaacataccatcatctaaaggctgttataaaagaaaaatatggtgaacaaggatgcaatgttggtgaagatggtggtttttctccaaacttatccaggcaagatagttacaatctgctgtctgcccccctaaaagagagcaatatatgttcaaaactcatatggggttcttatttgattatatccattggcagtgttcaagaaggattgaatcttgttaaagaggctatcagcagaacagggtacagtgagaaaattaagatggccattgatgtcgctgcaaccaccttttgcataggtaccaagtatgatttggactacaaattccaaaataaatctgggcagaatttcaagtcaggagatgatatgattaagatgtacgaagaactatgtgctgcgtacccgattgtttcgattgaagatccatttgatagggaggattgggaacatgtcaagcgtttctctgaccttggactttgtcaggtatgttcattacatttgggtttatcttttgtttacatacatacgaggagctgtaaaaggatttgttctcaggttgtaggggatgacttattgatgtcaaatcacaaacgtattgaaagagcaatacatgagtccagttgcactgcacttcttctcaaggtaaatcagattgggacagtaacagaagcccttgaagtggtgaagctggcaaaggatgcccactggggtgtggtggtatctcatagaagtggagaaacagaagattcttttatagctgatttatctgttggccttgccatgggtcagatcaaaacaggcgctccttgcaggggagagcgactagcaaaatacaaccagttgcttcggattgaggaagaactgggtgatcaagcagtttatgcaggtgaagattggagagcaacctga

SEQ ID NO: 228 - protein, 531 aa, Populus trichocarpa
MSVQEYLDKHVLSRKIEDAVNAAVRAKTPDPVLFISNHMRKAVPSVITKIKGRQILDSRGIPTVEVDLFTNKGSFRASVPSGHVTGMYEAVELRDGDKGMYLGNSVTRAVKNINEKISEALIGMDPTLQSQIDQAMIDLDKTEKKGELGANAMLAVSIAACKAGAAEKEAVPLYKHISDLSSKTNPTLPVPAFTVISGGKHAGNNLAIKEIMILPIGASTFEEALQMGSETYHHLKAVIKEKYGEQGCNVGEDGGFSPNLSRQDSYNLLSAPLKESNICSKLIWGSYLIISIGSVQEGLNLVKEAISRTGYSEKIKMAIDVAATTFCIGTKYDLDYKFQNKSGQNFKSGDDMIKMYEELCAAYPIVSIEDPFDREDWEHVKRFSDLGLCQVCSLHLGLSFVYIHTRSCKRICSQVVGDDLLMSNHKRIERAIHESSCTALLLKVNQIGTVTEALEVVKLAKDAHWGVVVSHRSGETEDSFIADLSVGLAMGQIKTGAPCRGERLAKYNQLLRIEEELGDQAVYAGEDWRAT

SEQ ID NO: 229 - DNA, 1485 bp, Populus trichocarpa
atggccttggctacacaaccagccaccaacttcttcaacaaaaagaaccctttactcaatagcttctctacaaaacaacccaaaacatcaacacggtctttagttatcagaaactccgtgactgtggctccaccatcaacggtcaggattgctaaagaatgcaaggtgaagtcagtgaaggcgaggcagatcattgatagcagagggaatcctaccgttgaggttgatctcgtcactgatgatcagctttaccgatcggctgtaccaagtggggcttctactgggatctatgaggctttggaacttagagatggagataaaagtgtttatggtggcaagggtgtgcttagtgctgttcaaaatgttaataactttttgggtcctaagcttcttggtgttgatgtcagaaatcaagctgatgtggatgctataatgctggatattgatggaactccaaataaggcaaaattgggtgctaatgctattcttggagtatccctgagtgtgtgccgggctggtgcaggggccaagggagttccattgtataaacacatccaggaaatatcaggaaccaaggagcttgttatgcctgttccagcttttaatgtcattaatggaggcagtcatgctggaaataatctggccatgcaagaatttatgattctgcctgtaggtgcgaccaatttcgctgaagcactccgaatgggcagcgaagtgtatcatacactgaagaaaattattgagaaaaaatatggacaagatgcttgcaatgttggagacgaggggggatttgctcccaatgttcaggataacagggaaggactagttttgctcatggatgcgattgaaaaggctggatacacaggaaagatcaagataggaatggacgttgctgcttcagagtttctcaaagatggaaaatatgatttgaactttaaaaaccaaccaaatgatggagctcatgtgctctcagcccaaagccttggtgacctctacaaggattttgtcaaggaattccctattgtgtctattgaagatccctttgaccaggatgattggaattcatgggcttcactacaatcttcagttgatatccagattgttggagatgatttgttggtcacaaatccaaagagaatcgctgaggcaattcagaaaaaggcttgcaatggcttgctactgaaggcgagcatcaaatctatcataaaatggaatttgcaagttaaccagataggtacagtgactgaatccattagagcagcacttgactccaaagctgcaggttggggtgtgatggtcagccatcgtagtggtgaaactgaggataacttcatagctgatctttctgttggcttggccagtggacagatcaagactggagctccttgcagaagtgagcggttggccaagtataatcagcttctgcgcattgaagaggaacttggaaatgtgcgatatgctggtgaagctttcagatccctttaa

SEQ ID NO: 230 - protein, 494 aa, Populus trichocarpa
MALATQPATNFFNKKNPLLNSFSTKQPKTSTRSLVIRNSVTVAPPSTVRIAKECKVKSVKARQIIDSRGNPTVEVDLVTDDQLYRSAVPSGASTGIYEALELRDGDKSVYGGKGVLSAVQNVNNFLGPKLLGVDVRNQADVDAIMLDIDGTPNKAKLGANAILGVSLSVCRAGAGAKGVPLYKHIQEISGTKELVMPVPAFNVINGGSHAGNNLAMQEFMILPVGATNFAEALRMGSEVYHTLKKIIEKKYGQDACNVGDEGGFAPNVQDNREGLVLLMDAIEKAGYTGKIKIGMDVAASEFLKDGKYDLNFKNQPNDGAHVLSAQSLGDLYKDFVKEFPIVSIEDPFDQDDWNSWASLQSSVDIQIVGDDLLVTNPKRIAEAIQKKACNGLLLKASIKSIIKWNLQVNQIGTVTESIRAALDSKAAGWGVMVSHRSGETEDNFIADLSVGLASGQIKTGAPCRSERLAKYNQLLRIEEELGNVRYAGEAFRSL

SEQ ID NO: 231 - DNA, 1338 bp, Populus trichocarpa
atggtaacgatcaaggctgttaaagctcgtcaaatttttgacagtcgtggaaatcccaccgttgaagctgatattttgctctctgatggaagctatgctagagctgccgttccaagtggtgcttccactggtgtctatgaagctttagagttgagagatggaggatcagattatcttgggaaaggtgtacttaaggctgtagggaatgtcaattctatcattggaccagccttgattggcaaggacccaacagagcaggttcaaatcgataatttcatggtacaagagctggatggaactgttaatgaatggggttggtgcaagcagaagctcggagcaaatgctatattggcagtgtcacttgctgtttgcaaagcaggtgcaatggttaagaagatccctctttaccagcacattgcaaatcttgctggaaacaagaccttggttttgccagtacctgcattcaatgtcatcaatggaggttcccatgctggaaataaactggcaatgcaggaattcatgattctccctgttggggcatcatctttcaaggaagccatgaaaatgggtgtagaagtgtatcatcacctgaagtctgtgattaagaagaagtatggacaagatgccaccaatgttggtgatgaaggtggctttgctcctaatattcaggaaaacaaagagggtcttgaactgctcaagacagcgatagccaaagctggatatactggaaaggttgtgattgggatggatgttgctgcgtcagagttttataatgacaaggacaagacctatgatttgaatttcaaggaagagaacaatgatggatcacagaagatatctggagacagtctaaagaatgtatacaagtcatttgtggctgattatccaattgtgtccatcgaggatccatttgatcaagatgattgggaacactatgctaagatgactggtgaagttggtgaacaggtgcaaattgttggtgatgatctacttgtcacaaaccccaagcgtgtggagaaagcaattaaggagaagtcctgcaatgcccttctattgaaggtgaatcaaattggttctgtaactgaaagtattgaagctgtgaaaatgtctaaacatgctggctggggtgtcatggcaagccacagaagtggtgaaactgaggatactttcattgcagacctttcagttggattgtctactggacagatcaagactggagctccttgcagatcagaacgccttgcaaaatacaaccagcttctcaggatagaggaagagctgggatctgcagcagtatatgcaggagcaaaattcagggcaccagttgaaccttactaa

SEQ ID NO: 232 - protein, 445 aa, Populus trichocarpa
MVTIKAVKARQIFDSRGNPTVEADILLSDGSYARAAVPSGASTGVYEALELRDGGSDYLGKGVLKAVGNVNSIIGPALIGKDPTEQVQIDNFMVQELDGTVNEWGWCKQKLGANAILAVSLAVCKAGAMVKKIPLYQHIANLAGNKTLVLPVPAFNVINGGSHAGNKLAMQEFMILPVGASSFKEAMKMGVEVYHHLKSVIKKKYGQDATNVGDEGGFAPNIQENKEGLELLKTAIAKAGYTGKVVIGMDVAASEFYNDKDKTYDLNFKEENNDGSQKISGDSLKNVYKSFVADYPIVSIEDPFDQDDWEHYAKMTGEVGEQVQIVGDDLLVTNPKRVEKAIKEKSCNALLLKVNQIGSVTESIEAVKMSKHAGWGVMASHRSGETEDTFIADLSVGLSTGQIKTGAPCRSERLAKYNQLLRIEEELGSAAVYAGAKFRAPVEPY

SEQ ID NO: 233 - DNA, 1464 bp, Ostreococcus tauri
atgagcgtccaggagtacatcgaaaagcacgacctcacgcgtaaggttgaggaggcgctgaacgccgcggtgaaggccaaggcggatgaaccgctcgcgttcgtgagcgagtacatgaagaagcgcaccgcgccggccatcacgaaggtcgtcggtcgccaaatcttcgactcccgcggtaacccgacggtcgaggccgacgtgtacacgcacaagggtatgttccgcgccatggtgccgagcggcgcttccaccggtatctacgaagcggtggagcttcgcgacggtggcaacacgtacatgggcaagggcgtgcagcaagccgtcaagaacttgaacgaaatcatcgccccggcgctcgttggcaaggacccgcgcgagcaaaaggcacttgatgacttcatgtgcaaggaactcgacggcacggagaacaagggcaagctcggcgcgaacgccatcctcgccgtctccatggctatcgccaaggcgggcgccgccgaaaaggacgtgccgctctacaagcacctcgccgacctcgcgggcaacggtaagttggtcctcccggtcccggcgttcaacgtcattaacggtggctcccacgccggtaacaaactcgccatgcaagagtttatgattttgcccgtcggcgccaagaccttcaaggaagccatgcaaatgggctccgaagtgtaccacaacttgaagtctgtcatcaagaagaagtacggccaagacgcgtgcaacgtcggtgacgaaggtggcttcgccccgaacattcaagacaacaaggaaggtctcgacctcctcgttgaagcgatcgaaaaggctggctacaccggcaagatgaagatcggtatggacgtcgccgcctccgagttcctgaccgaagacaagcaatacgaccttgacttcaagactgagaacaacgacggttccatgaagaagacgggcgctcaaatgatcgacttgtaccaagagttcatcaacgagtatccgatgatctccatcgaggatccgttcgaccaagacgacgctgaaaacaccgcggcgctcaccgccaagggcaactgccaaatcgtcggtgacgacttgttggtgaccaacccgaagcgcgtgcaagccgccatcgacggtaagtggtgcaacgccctcttgctcaaggtgaaccaaatcggtaccatctccgagtccatcgaagccgtcggcatgtccaagcgcgccggttggggtgtgatggcctcccaccgatccggcgagaccgaagattgctttatcgctgatcttgcggtcggcttatccactggccaaatcaagaccggcgctccgtgccgctccgagcgcttggcaaagtacaaccagctcctccgcatcgaagaggaactcggcgacgccgccgtgtacgcgggcgaaaactacaagcacattgcttggtagagcgcctctcgcttccgtagatccccatga

SEQ ID NO: 234 - protein, 486 aa, Ostreococcus tauri
MSVQEYIEKHDLTRKVEEALNAAVKAKADEPLAFVSEYMKKRTAPAITKVVGRQIFDSRGNPTVEADVYTHKGMFRAMVPSGASTGIYEAVELRDGGNTYMGKGVQQAVKNLNEIIAPALVGKDPREQKALDDFMCKELDGTENKGKLGANAILAVSMAIAKAGAAEKDVPLYKHLADLAGNGKLVLPVPAFNVINGGSHAGNKLAMQEFMILPVGAKTFKEAMQMGSEVYHNLKSVIKKKYGQDACNVGDEGGFAPNIQDNKEGLDLLVEAIEKAGYTGKMKIGMDVAASEFLTEDKQYDLDFKTENNDGSMKKTGAQMIDLYQEFINEYPMISIEDPFDQDDAENTAALTAKGNCQIVGDDLLVTNPKRVQAAIDGKWCNALLLKVNQIGTISESIEAVGMSKRAGWGVMASHRSGETEDCFIADLAVGLSTGQIKTGAPCRSERLAKYNQLLRIEEELGDAAVYAGENYKHIAWSASRFRRSP

SEQ ID NO: 235 - protein, 137 aa, Artificial sequence
  PFOO113 enolase_N domain in SEQ ID NO: 194
TIVSVKARQIFDSRGNPTVEVDVCCSDGTFARAAVPSGASTGVYEALELRDGGSDYLGKGVSKAVDNVNSVIAPALIGKDPTSQAELDNFMVQQLDGTKNEWGWCKQKLGANAILAVSLAICKAGAIIKKIPLYQHI

SEQ ID NO: 236 - protein, 296 aa, Artificial sequence
  PFO3950 enolase_N domain in SEQ ID NO: 194
QLVLPVPAFNVINGGSHAGNKLAMQEFMILPTGAASFKEAMKMGVEVYHNLKSVIKKKYGQDATNVGDEGGFAPNIQENKEGLELLKTAIEKAGYTGKVVIGMDVAASEFYNDKDKTYDLNFKEENNDGSQKISGDSLKNVYKSFVSEYPIVSIEDPFDQDDWEHYAKMTAEIGEQVQIVGDDLLVTNPTRVAKAIQEKSCNALLLKVNQIGSVTESIEAVKMSKRAGWGVMTSHRSGETEDTFIADLAVGLATGQIKTGAPCRSERLAKYNQLLRIEEELGAAAVYAGAKFRAPV

SEQ ID NO: 237 - protein, 7 aa, Artificial sequence
  Motif 12
  VARIANT (4)..(4): /replace = "Gln"
SIEDPFD

SEQ ID NO: 238 - protein, 6 aa, Artificial sequence
  Motif 13
VGDDLL

SEQ ID NO: 239 - protein, 5 aa, Artificial sequence
  Motif 14
GAPCR

SEQ ID NO: 240 - protein, 9 aa, Artificial sequence
  Motif 15
  VARIANT (5)..(5): /replace = "Ile"
KYNQLLRIE

SEQ ID NO: 241 - DNA, 2194 bp, Oryza sativa; identical to SEQ ID NO: 188

SEQ ID NO: 242 - DNA, 1827 bp, Oryza sativa
gcttgagtcatagggagaaaacaaatcgatcatatttgactcttttccctccatctctcttaccggcaaaaaaagtagtactggtttatatgtaaagtaagattctttaattatgtgagatccggcttaatgcttttcttttgtcacatatactgcattgcaacaattgccatatattcacttctgccatcccattatatagcaactcaagaatggattgatatatcccctattactaatctagacatgttaaggctgagttgggcagtccatcttcccaacccaccaccttcgtttttcgcgcacatacttttcaaactactaaatggtgtgttttttaaaaatattttcaatacaaaagttgctttaaaaaattatattgatccatttttttaaaaaaaatagctaatacttaattaatcacgtgttaaaagaccgctccgttttgcgtgcaggagggataggttcacatcctgcattaccgaacacagcctaaatcttgttgtctagattcgtagtactggatatattaaatcatgttctaagttactatatactgagatgaatagaataagtaaaattagacccaccttaagtcttgatgaagttactactagctgcgtttgggaggacttcccaaaaaaaaaagtattagccattagcacgtgattaattaagtactagtttaaaaaacttaaaaaataaattaatatgattctcttaagtaactctcctatagaaaacttttacaaaattacaccgtttaatagtttggaaaatatgtcagtaaaaaataagagagtagaagttatgaaagttagaaaaagaattgttttagtagtatacagttataaactattccctctgttctaaaacataagggattatggatggattcgacatgtaccagtaccatgaatcgaatccagacaagttttttatgcatatttattctactataatatatcacatctgctctaaatatcttatatttcgaggtggagactgtcgctatgtttttctgcccgttgctaagcacacgccacccccgatgcggggacgcctctggccttcttgccacgataattgaatggaacttccacattcagattcgataggtgaccgtcgactccaagtgctttgcacaaaacaactccggcctcccggccaccagtcacacgactcacggcactaccacccctgactccctgaggcggacctgccactgttctgcatgcgaagctatctaaaattctgaagcaaagaaagcacagcacatgctccgggacacgcgccacccggcggaaaagggctcggtgtggcgatctcacagccgcatatcgcatttcacaagccgcccatctccaccggcttcacgaggctcatcgcggcacgaccgcgcacggaacgcacgcggccgacccgcgcgcctcgatgcgcgagcccatccgccgcgtcctccctttgcctttgccgctatcctctcggtcgtatcccgtttctctgtcttttgctccccggcgcgcgccagttcggagtaccagcgaaacccggacacctggtacacctccgccggccacaacgcgtgtccccctacgtggccgcgcagcacatgcccatgcgcgacacgtgcacctcctcatccaaactctcaagtctcaacggtcctataaatgcacggatagcctcaagctgctcgtcacaaggcaagaggcaagaggcaagagcatccgtattaaccagccttttgagacttgagagtgtgtgtgactcgatccagcgtagtttcagttcgtgtgttggtgagtgattccagccaagtttgcg

SEQ ID NO: 243 - DNA, 49 bp, Artificial sequence
  primer 9
ggggacaagtttgtacaaaaaagcaggcttaaacaatggcggcgacgat

SEQ ID NO: 244 - DNA, 47 bp, Artificial sequence
  primer 10
ggggaccactttgtacaagaaagctgggttttagtagggctccacgg

SEQ ID NO: 245 - protein, 186 aa, Artificial sequence
  DNA binding domain
SKAVDNVNSVIAPALIGKDPTSQAELDNFMVQQLDGTKNEWGWCKQKLGANAILAVSLAICKAGAIIKKIPLYQHIANLAGNKQLVLPVPAFNVINGGSHAGNKLAMQEFMILPTGAASFKEAMKMGVEVYHNLKSVIKKKYGQDATNVGDEGGFAPNIQENKEGLELLKTAIEKAGYTGKVVIGM

SEQ ID NO: 246 - protein, 152 aa, Artificial sequence
  repressor domain
EYPIVSIEDPFDQDDWEHYAKMTAEIGEQVQIVGDDLLVTNPTRVAKAIQEKSCNALLLKVNQIGSVTESIEAVKMSKRAGWGVMTSHRSGETEDTFIADLAVGLATGQIKTGAPCRSERLAKYNQLLRIEEELGAAAVYAGAKFRAPVEPY

SEQ ID NO: 247 - DNA, 1490 bp, Arabidopsis thaliana
aaaaagggttaggtggatctctcatgaaatcggtggagctcccccatatcttttttaaatagctttcttcttttggccccttacccagagatagattcttatatactactgagaatcttcaatttctgcaacttttgtatctcttcctgatcaccaaataagaaaactcttgtggttctattgaattgggtttccactatctttattgtagagatggagtcttcaagtccccaccatagtcacattgttgaggttaatgttggaaaatctgatgaagagagaataattgtggcgagtaaagtctgtggagaagcaccatgtgggttttcagattctaagaatgcttccggggatgctcacgaacgctctgcttctatgcggaagctttgtatcgccgtcgtgctgtgtctagtgttcatgagtgttgaagttgttggtgggattaaagccaatagtttagctatattaaccgatgcagctcatttgctctctgacgttgctgcctttgctatctccctcttctcattgtgggctgctggctgggaagcgactcctaggcagacttacgggttcttcaggattgagattttgggtgctcttgtatctatccagctcatttggttgctcacgggtattctggtttatgaagcgattatcagaattgttacagagaccagtgaggttaatggattcctcatgtttctggttgctgcctttggtctagtggtgaacatcataatggctgttctgctagggcatgatcatggtcacagtcatggacatgggcatggccacggccatgaccatcacaatcatagccatggggtgactgttaccactcatcaccatcatcacgatcatgaacatggccatagtcatggtcatggagaggacaagcatcatgctcatggggatgttactgagcaattgttggacaaatcgaagactcaagtcgcagcaaaagagaaaagaaagagaaacatcaatctccaaggagcttatctgcatgtccttggggattccatccagagtgttggtgttatgattggaggagctatcatttggtacaatccggaatggaagatagtggatctgatctgcacacttgccttttcggttattgtcctaggaacaaccatcaacatgattcgcaacattctagaagtattgatggagagtacacccagagagattgacgccacaaagctcgaaaagggtttgctcgaaatggaagaagtggtggctgttcatgagctccacatatgggctatcacagtgggaaaagtgctattggcttgccatgtcaatatcagaccagaagcagatgcagatatggtgctcaacaaggtaattgattacatccgcagggagtacaacattagtcatgtcacgatacaaatcgagcgctaaaagctaagtaagatctgatgaagggtttttgtatcagcattctcattaacaataaaatcaataaagtttctactcgtgcc

SEQ ID NO: 248 - DNA, 1197 bp, Arabidopsis thaliana
atggagtcttcaagtccccaccatagtcacattgttgaggttaatgttggaaaatctgatgaagagagaataattgtggcgagtaaagtctgtggagaagcaccatgtgggttttcagattctaagaatgcttccggggatgctcacgaacgctctgcttctatgcggaagctttgtatcgccgtcgtgctgtgtctagtgttcatgagtgttgaagttgttggtgggattaaagccaatagtttagctatattaaccgatgcagctcatttgctctctgacgttgctgcctttgctatctccctcttctcattgtgggctgctggctgggaagcgactcctaggcagacttacgggttcttcaggattgagattttgggtgctcttgtatctatccagctcatttggttgctcacgggtattctggtttatgaagcgattatcagaattgttacagagaccagtgaggttaatggattcctcatgtttctggttgctgcctttggtctagtggtgaacatcataatggctgttctgctagggcatgatcatggtcacagtcatggacatgggcatggccacggccatgaccatcacaatcatagccatggggtgactgttaccactcatcaccatcatcacgatcatgaacatggccatagtcatggtcatggagaggacaagcatcatgctcatggggatgttactgagcaattgttggacaaatcgaagactcaagtcgcagcaaaagagaaaagaaagagaaacatcaatctccaaggagcttatctgcatgtccttggggattccatccagagtgttggtgttatgattggaggagctatcatttggtacaatccggaatggaagatagtggatctgatctgcacacttgccttttcggttattgtcctaggaacaaccatcaacatgattcgcaacattctagaagtattgatggagagtacacccagagagattgacgccacaaagctcgaaaagggtttgctcgaaatggaagaagtggtggctgttcatgagctccacatatgggctatcacagtgggaaaagtgctattggcttgccatgtcaatatcagaccagaagcagatgcagatatggtgctcaacaaggtaattgattacatccgcagggagtacaacattagtcatgtcacgatacaaatcgagcgctaa

SEQ ID NO: 249 - protein, 398 aa, Arabidopsis thaliana
MESSSPHHSHIVEVNVGKSDEERIIVASKVCGEAPCGFSDSKNASGDAHERSASMRKLCIAVVLCLVFMSVEVVGGIKANSLAILTDAAHLLSDVAAFAISLFSLWAAGWEATPRQTYGFFRIEILGALVSIQLIWLLTGILVYEAIIRIVTETSEVNGFLMFLVAAFGLVVNIIMAVLLGHDHGHSHGHGHGHGHDHHNHSHGVTVTTHHHHHDHEHGHSHGHGEDKHHAHGDVTEQLLDKSKTQVAAKEKRKRNINLQGAYLHVLGDSIQSVGVMIGGAIIWYNPEWKIVDLICTLAFSVIVLGTTINMIRNILEVLMESTPREIDATKLEKGLLEMEEVVAVHELHIWAITVGKVLLACHVNIRPEADADMVLNKVIDYIRREYNISHVTIQIER

SEQ ID NO: 250 - DNA, 1926 bp, Arabidopsis thaliana
gtgggataataacctactctaaagcaagatagccaaagctagaaatcctcttgttaagacatcttatgatatacaaatctttgtttctactttcttcattcattctgcaggtagcgaaaggatttggtagttaaataagtggctggtcaacgaaaaatcaaaagcataatgctttcaagaaccaaggtatgtcttcttttatctgttattaaaatttctgataccgctttgtatatgtgctttgataggactacatgttttatgtgccctgataatcttcggaaattgaaaaagtcaaaccaaaaaaaatgatttgcagatcggctaatgaagaacagttcaattaaaagtctaatagatagtcttaaaataaagaaaggtttgatagtcaatagtcatttcgtgtctcagatggattaccaatgtaatatataatatatgatactatatagttttgagaaagagactagatgggaggcatgtatcatgactttctctatttctttttgttctctctcagttttccaatattgcgtataacttttggttttgaggttttatatataaagagtttgccagaatggtatggtgacacccaaattacatctcgatctctctcttacaaaaaagatgaaagaccatattcatgagcatgaccacatggttcagatttgtggggaagtttcatcaggagaaacaagcttggtgggcatcaagaagacatgtggagaagcgccttgcggattctcagatgccaagaccagttcaatagaagctcaagagcgtgcagcatcaatgagaaagctattaatagctgttcttctctgtgccattttcatagttgtagaagtcgttggaggaatcaaggccaacagtcttgcgattctcacagatgcagctcatctgttatctgatgttgcagcctttgcaatatctttgttctcgctctgggcttcgggatggaaggcaaaccctcagcaatcttatgggtttttcagaatagagattcttggtgctcttgtctccattcaaatgatttggcttcttgctggtatcttggtttatgaagccattgttagacttaacaacggtagtggtgaagtggagggatctcttatgtttgctgtctctgcagttggcttacttgtgaacattgcaatggctattctgttaggtcatgaccatggtcatggtcatggtcatagtcatgacaatggtcacggtcatagtcatgatcatggccatggaatagccgcaaccgagcatcatcatgactctggtcatgatgaatcacaactatctgatgtcttaatcgagcaaaagaagcagcgtaatgtaaatattcaaggggcttatcttcacgtgctgggagattcgatacagagcgtaggagtgatgataggaggagcaatcatatggtataagccggagtggaagatccttgatttgatatgcacattggttttctctgtgattgtgttagggacaacaattgggatgcttaggaacattctagaggttttaatggagtcaacaccacgagagattgacccgacaatgcttgaaaagggagtgtgtgaaattgaagaagtggtggctgttcatgagcttcacatttgggcgattactgtcggcaaacttttgttggcatgtcatgttaaaatcagacctgaggcagaggcagatatggttttggacaagattatcgattacattaagagggaacacaacattagtcacgtgactattcagatcgaacgtcaatgaagcaacgtgacaaggcgtttttgcattatcatatctactttgtctgaccattttgtaatgtttgtcttgtgtacaaaagtgtttttttttcccaacgtatgtatcatattgtctataattgttttttggtttgaggataagccctgcgttaacgatcaa

SEQ ID NO: 251 - protein, 393 aa, Arabidopsis thaliana
MVTPKLHLDLSLTKKMKDHIHEHDHMVQICGEVSSGETSLVGIKKTCGEAPCGFSDAKTSSIEAQERAASMRKLLIAVLLCAIFIVVEVVGGIKANSLAILTDAAHLLSDVAAFAISLFSLWASGWKANPQQSYGFFRIEILGALVSIQMIWLLAGILVYEAIVRLNNGSGEVEGSLMFAVSAVGLLVNIAMAILLGHDHGHGHGHSHDNGHGHSHDHGHGIAATEHHHDSGHDESQLSDVLIEQKKQRNVNIQGAYLHVLGDSIQSVGVMIGGAIIWYKPEWKILDLICTLVFSVIVLGTTIGMLRNILEVLMESTPREIDPTMLEKGVCEIEEVVAVHELHIWAITVGKLLLACHVKIRPEAEADMVLDKIIDYIKREHNISHVTIQIERQ

SEQ ID NO: 252 - DNA, 1313 bp, Arabidopsis thaliana
gtttgactctctgttatggtatgagtatgttgtcatatcatttaatgtgaatttttggtttgctcgcatccttgtgtagttgtgggatgcatgtctctgttttttccacctttaaaaatctccttcaagtctcaaactctaacaccttactcctgaattgagtttctactatcttgttgtaagatggattcaagaagaagtaaagtttgtggagaaacagcttgtgggttttcaacatcttcaagtgatgctaagaaacgagctgcttcaatgcgaaagctctgtttcgttgtggtgttatgtcttttgttcatgagcatagaagttgtttgtggcattaaggctaacagtttggctatattagcagatgcagctcatttgctcactgatgttggtgcttttgctatctctatgctctccttgtgggcttcttcttgggaagcaaatccgcgacagagttatgggttcttcaggatagagattttaggcactcttgtctcaatccagctcatttggttactcactgggattttggtctacgaagccgtaactagactcgttcaagagaccaatgatgatgttgatggtttctttatggttcttgttgctgcttttggtttagttgtaaacatcataatgattgttgtgcttggacatgatcacggacatgggcatgatcatggtcacagtcatgatcatggtcatagttatggggaaagagctgagcagttgttggagaaatccaaggaaataaggaacattaatgtgcaaggggcttatcttcatgttcttggggatttaattcagagcattggggtaatgattggagggggtatgatttggtataaccctaaatggaaagtaattgacttgatatgcacgttattcttttcagttattgttttagggacaaccattaagatgcttcgaagcatacttgaagttctaatggagagcacaccgagagagatagacgcgaggcagctcgaaaagggattgatggaaattgaggaagttgtggatgttcatgagctgcacatatgggcaattacagttggaaaagctctgttttcttgtcatgtcaaggttagaccagaagctggtgatgaaatggtgctgaacaaagtgatcgattacatctggagagagtatcgtatcagtcacgttacgatacaaatcgagcgttaaaacaacaaaagggttcatttctctggttttctgtcattttcatgatcaaagttaaatcttttttcgctttctcgtatgctctcattaccttgttgtgacatatgccattgtctttcttgtttatg

SEQ ID NO: 253 - protein, 334 aa, Arabidopsis thaliana
MDSRRSKVCGETACGFSTSSSDAKKRAASMRKLCFVVVLCLLFMSIEVVCGIKANSLAILADAAHLLTDVGAFAISMLSLWASSWEANPRQSYGFFRIEILGTLVSIQLIWLLTGILVYEAVTRLVQETNDDVDGFFMVLVAAFGLVVNIIMIVVLGHDHGHGHDHGHSHDHGHSYGERAEQLLEKSKEIRNINVQGAYLHVLGDLIQSIGVMIGGGMIWYNPKWKVIDLICTLFFSVIVLGTTIKMLRSILEVLMESTPREIDARQLEKGLMEIEEVVDVHELHIWAITVGKALFSCHVKVRPEAGDEMVLNKVIDYIWREYRISHVTIQIER

SEQ ID NO: 254 - DNA, 1477 bp, Cathamus tinctorius
atatatattacccgaattgtccttggtctcttaaccaaacatcatgatcggaatccccaatatcttcttcacagacgccattattctcttctatataaatccatctatatacctccatggataaaccctactccacctccacctccacctccacctccaaagtgtaggcctctacaaacccttattgcctcctccttctgatccatcgctcaataatcaaaccgcttgatctctcagatggatgctgagaaccgaggccatgggcatgccgttgacatatctgcggatgcgccagctgaagagaacaggctaaccggaagtaaagtttgtgggggagcgccgtgtgggttctcggatgcgaaagcgagttctaaggaggcaagggagcggtcggcttccatgtggaagctttggggtggggttatattgtgcttcattttcatgggtgttgaagtatttggtggaattaaagcaaacagtcttgcaatattgaccgatgccgctcatttgttatccgacgttgctgcttttgcgatttcgttgttttcggtttgggcttctgggtgggaagccacacctcgtcagtcttatgggtttttcaggatcgagattcttggaacgctggtgtccattcagatcatatggctgcttactgggattctggtatacgaagcaatagttaggctcattcatggtacaattgaagtcgaaggcagacttatgttcataattgctgcttttggcttaattgttaacatagtcatgatattcatactcggtcatgaccatggccatggccatggccatagtcacggccatggacatggacatggacatcaagagcatgatcatggtgatagccaagaagatgtgcatatccatggagttagcgtcacaacacatcatcaccaccatcatggtcctggtcatgatcatggtcatgatcatggtcatggtcatgacgaacaacaactgcagcagccgctactgaagacgtactctggaggtgaagtgaaagagaagaagaggaatataaacgttcaaagtgcttatcttcacgttttgggggattcgattcagagcatcggcgtaatgattggggcgggggtaatttggtacaaaccggagctgaaaatcatcgaccccatttgcgcgttgctgttttcgatcatagttttgtatacgaccatcaacatgctgcgtgacatattggaggttctgatggaaagcacgccgagagagatcgatgcaacgagcctcgaaagggggctttgcgagatcaatgaggtggtcgccattcatgggctgcatatatgggcgattacggtcgggaaagtgctgttggcgtgccacgtgaggatcagacgcgaagccgatgcggatatggtgctggacaaggtggtggattacatcaagagggagtataacatcagccatgtaacaattcagatagagagagaataaatgaagtttgatt

SEQ ID NO: 255 - protein, 408 aa, Cathamus tinctorius
MDAENRGHGHAVDISADAPAEENRLTGSKVCGGAPCGFSDAKASSKEARERSASMWKLWGGVILCFIFMGVEVFGGIKANSLAILTDAAHLLSDVAAFAISLFSVWASGWEATPRQSYGFFRIEILGTLVSIQIIWLLTGILVYEAIVRLIHGTIEVEGRLMFIIAAFGLIVNIVMIFILGHDHGHGHGHSHGHGHGHGHQEHDHGDSQEDVHIHGVSVTTHHHHHHGPGHDHGHDHGHGHDEQQLQQPLLKTYSGGEVKEKKRNINVQSAYLHVLGDSIQSIGVMIGAGVIWYKPELKIIDPICALLFSIIVLYTTINMLRDILEVLMESTPREIDATSLERGLCEINEVVAIHGLHIWAITVGKVLLACHVRIRREADADMVLDKVVDYIKREYNISHVTIQIERE

SEQ ID NO: 256 - DNA, 1635 bp, Eucalyptus grandis
ggaagacgagggagacctagtcggagcgcaaacgcctccgccccgaaaagcaccagcggccgcgtcgatctctccatctccggagctcagtccggagcggcaagatgagcacgcatgattctgaacatgggcacatcattgaagtgtgtcaagatgtgccagccatggaaacaggccaggttggtagtaaggtatgcgcagaggcaccttgtggtttttcagacgttagaaatagtttgaaagatgcaagagagaggtcaacctctacgaagaaacttttaattgcggtggtgctttgtattatcttcatgagcatagaagtatttggtggtattgaagccaacagtcttgccattctcacagatgcagcgcatttgctgtcagatgttgccgcatatgcgatatccttattctctctttgggcatcaggttgggaggcaactccacgccagtcttatggtttcttccgaattgaaattcttggtgcacttgtctccatccagattatatggctacttgctgggattcttgtgtatgaagcaatagaaagacttatcaatggtacaacggaagttcatggctttctcatgttcattattgctgcctttggtcttcttgtgaatattgccatggcactgttactgggtcacgatcacagccatggacatggtcatgaccatgggcatggacatagtcatgggcatgatgatgcacatgaacatagtgatcatgctcatagccatgaggatcatggtgatttgcatactcatggattaaccatcaagaaacatgaccatcatcatcatggagaagattctaaaggacatgctgatcaacttcatggccatgaaacagatcaaactgagcctcttttgcagacttgctcggaagctgaaggtgactcaaaacttggagccaaacagaagcagcaacgtaatattaacatgcaaggtgcttatcttcatgtacttggggattccattcaaagtgtgggtgtgatgattggcggtgcaattatatggattaagcccgagtggacgattgtcgacttgatttgcaccctgatattctcagtaattgtgcttgggacaacaataaggatgctccgtaacattctggaggttttgatggagagtacgcctagagagattgatgccactaggctcgagagtggactttgcaagatggatgaagtgattgcagttcatgaactgcacatctgggctataacggttggaaaggtgctattagcctgccatgtcaaaataaagcgtgacgccaatgccgatatggtcctggacaaggtcgtggattacatcagaagagagtacaagataagtcacgtcaccattcaagtagaaagagagtagatgttggaaggtgaatgatttagttttggcattgtatatggatggtagcgttggggtcacaattcagcttctaatttgtttggatgttgccgtttcggcctttttctggtagctgggcctttgaggcccttcaggagtatgatgtaatgtccttactttctgtctaagtttctttcaccatgtttactagttcagtaagtattaaagagagctgctccaatttagctgaattggatctttaacaatgattactagttcaaaaaaa

SEQ ID NO: 257 - protein, 421 aa, Eucalyptus grandis
MSTHDSEHGHIIEVCQDVPAMETGQVGSKVCAEAPCGFSDVRNSLKDARERSTSTKKLLIAVVLCIIFMSIEVFGGIEANSLAILTDAAHLLSDVAAYAISLFSLWASGWEATPRQSYGFFRIEILGALVSIQIIWLLAGILVYEAIERLINGTTEVHGFLMFIIAAFGLLVNIAMALLLGHDHSHGHGHDHGHGHSHGHDDAHEHSDHAHSHEDHGDLHTHGLTIKKHDHHHHGEDSKGHADQLHGHETDQTEPLLQTCSEAEGDSKLGAKQKQQRNINMQGAYLHVLGDSIQSVGVMIGGAIIWIKPEWTIVDLICTLIFSVIVLGTTIRMLRNILEVLMESTPREIDATRLESGLCKMDEVIAVHELHIWAITVGKVLLACHVKIKRDANADMVLDKVVDYIRREYKISHVTIQVERE

SEQ ID NO: 258 - DNA, 1394 bp, Ipomoea nil
gggcaaaagtggaatctctttcctgggcggttgaaaatctctattcaagggccgctaactgttccaatcagagatggatgtacggatctcagagcatgaccaagtaattcaggtaagcggtgatgtcccagcacaggagaggggtgctgttgggagtaaattgtgtggggaagcaccatgtgggtttgcagatgctaaaaccagtttgaaggacacacaagagcgctcggcagccatgaaaaaactctgtattgctgtggtactctgtgtcgtgtttatgactgttgaagttattggaggtattaaagcaaacagtcttgcgatattgacggatgcggctcatttgttgtcagatgttgcagcttttgcaatatcgttgttttcactgtgggcggcaggatgggaagctaccccgcgccagtcctatgggtttttcaggattgagattcttggggcgttggtttctattcaaatgatatggcttcttgctgggatccttgtttatgaggctattgatagactgataaatgatacaggtgaagtccagggatccctcatgtttgcagtttctgcttttggattagtggtcaatataattatggctgtcttgcttggtcatgaccatggacatggacatggacatggacatggccatgaccatgggcacggagggcatgatcatgggcatggagggcatgatcatgggcatagccatgatggagttacaatcgttcaacaccatgaccatcacgaggggcattctggccacaacgaacacgagtcagatcatacacatcccctacttaaggcttgctccgagggtgaaaacggatcaaaaggtggaaagaagaaggaaaggaacataaatgtgcagggggcctatcttcacgtactcggggattctattcagagcgtgggcgtgatgattggcggggcaatcatatggtacaaaccagaatggaagatcatcgatctcttctgcactctaatcttctctgtgctcgtgctggtgacgaccataaggatgatacgcaatatcctcgaggtattgatggagagcaccccccgagagattgatgcaaccaggcttgagcaggggctttgtgagatggaggaggttgttgcagttcatgagttgcatatatgggcaataacagtggggaaagtgctgttagcctgccatgtaaagatcaagaaggaagcagatgccgacattgtactggacaaggtaattgactatattaaaacagagtacaatattacccatgttaccattcagatagaaagagagtagttagaacctgttggaacttggaagcctagaaatgtgtttgtaatccacatgatattgttttcagaatattttagactccggttggttcctcaatcaattt

SEQ ID NO: 259 - protein, 406 aa, Ipomoea nil
MDVRISEHDQVIQVSGDVPAQERGAVGSKLCGEAPCGFADAKTSLKDTQERSAAMKKLCIAVVLCVVFMTVEVIGGIKANSLAILTDAAHLLSDVAAFAISLFSLWAAGWEATPRQSYGFFRIEILGALVSIQMIWLLAGILVYEAIDRLINDTGEVQGSLMFAVSAFGLVVNIIMAVLLGHDHGHGHGHGHGHDHGHGGHDHGHGGHDHGHSHDGVTIVQHHDHHEGHSGHNEHESDHTHPLLKACSEGENGSKGGKKKERNINVQGAYLHVLGDSIQSVGVMIGGAIIWYKPEWKIIDLFCTLIFSVLVLVTTIRMIRNILEVLMESTPREIDATRLEQGLCEMEEVVAVHELHIWAITVGKVLLACHVKIKKEADADIVLDKVIDYIKTEYNITHVTIQIERE

SEQ ID NO: 260 - DNA, 1583 bp, Nicotiana benthamiana
gatcacaaatcacaaccctacactaatactgaatttttgaaaagtgggttgcatttttctattccgagattccttttatctcttcccttttttctcctttttcttctttctttaggtatataccccatatatagcctataaaccaaatagctatataaaaactctacatctatttggcgaatttgatgatttgggtaagctaaagatacgatcgttttactacccttttgaaatcttggcataaatttgtgagatggagacgcagaacctggaacgtggacatgtaattgaggtacgttgtgacatggcagctcaagaaaaggggactaaaatatgtggttcagcaccgtgtggattctcagatgttaacaccatgtctaaggatgcacaggagagatcggcatccatgaggaaactttgcatcgcggttgtcctctgcatcatttttatggctgtcgagtttgttggtggcattaaagccaacagtctggcaatattgacagacgctgctcatctactatcagatgttgcagcttttgcaatatcgttgttttcactttgggcagcaggatgggaagctaatccacgccagtcctatgggtttttcagaatcgagatactcggggcattagtttctatccaaatgatatggcttctagctgggatccttgtttatgaagccattgctcgtcttatacatgatacaggtgaagttcaaggcttcctcatgtttgtggtgtctgcatttggattagcagtgaacctcatcatggcactcttgctaggtcatgatcatggccacggccatggccacggccatggccacagccacggtcatgaacatggccatgaacacggccataatcatgaagaacatgctcatagccattctgatcatgagcacggccatggagagcatacacatatacatggaattagcgttagccgacaccatcaccataatgagggaccttcgagccgagatcaacactcccatgcacatgatgcagatcacaccgagcctctacttaaggattcatgtgagggtgaaggtgtgccagaaggtgaaaagaaaaagaagcagaggaacataaatgttcagggggcttatcttcatgtactaggagattctattcagagcataggggtcatgattggcggagctattatatggtataaaccagagtggaaaatcattgatctaatttgcactctcattttctctgtaattgtgctgggggcaaccattaagatgcttcgaagtattcttgaagtattaatggagagcacaccaagagaaattgatgcaacaaggctcgagaaggggctctgtgagatggaggacgttgtcacaatccacgaattgcacatatgggcgattacagtcggcaaagtgctcctggcttgccatgtcaagattaagcccgacgctgatgctgacacagtgctggataaggtgattgattatattaagagggaatataacattagccatgttaccattcaaatagaaagagagtaggggcatggaaaagtttattttggctgttgtactggtcattggcttctttattcttttgaat

SEQ ID NO: 261 - protein, 422 aa, Nicotiana benthamiana
METQNLERGHVIEVRCDMAAQEKGTKICGSAPCGFSDVNTMSKDAQERSASMRKLCIAVVLCIIFMAVEFVGGIKANSLAILTDAAHLLSDVAAFAISLFSLWAAGWEANPRQSYGFFRIEILGALVSIQMIWLLAGILVYEAIARLIHDTGEVQGFLMFVVSAFGLAVNLIMALLLGHDHGHGHGHGHGHSHGHEHGHEHGHNHEEHAHSHSDHEHGHGEHTHIHGISVSRHHHHNEGPSSRDQHSHAHDADHTEPLLKDSCEGEGVPEGEKKKKQRNINVQGAYLHVLGDSIQSIGVMIGGAIIWYKPEWKIIDLICTLIFSVIVLGATIKMLRSILEVLMESTPREIDATRLEKGLCEMEDVVTIHELHIWAITVGKVLLACHVKIKPDADADTVLDKVIDYIKREYNISHVTIQIERE

SEQ ID NO: 262 - DNA, 1513 bp, Nicotiana tabacum
atggagacgcagaacctggaacgtggacatgtaattgaggtacgttgtgacatggcagctcaagaaaaggggactaaaatctgtggttcagcaccgtgtggattctcagatgttaacaccatgtctaaggatgcacaggagagatcagcatccatgaggaaactttgcatcgcggttgtcctctgcatcatatttatggctgttgaggttgttggtggtattaaagccaacagtctggcaatattgaccgacgctgctcatctactatcagatgttgcagcttttgcaatatccttgttttcactctgggcagcaggatgggaagctaatccacgccagtcctatgggtttttcagaatcgagatactcggggcattagtttctatccaaatgatatggcttctagctgggatccttgtttatgaagccattgctcgacttattcatgatacaggtgaagttcaaggcttcctcatgtttgtggtgtctgcatttggattagtagtgaacctcatcatggcactcttgttaggtcatgatcatggccacggccacggccatggccacagccacggtcatgaccatgaacacggccataatcatggcgagcatgctcatagcaatactgatcatgagcacggccatggtgagcatacgcatatacatggaattagcgttagccgacaccatcaccataatgagggaccttcgagccgagatcaacacccccatgcgcatgatggagatcacaccgtgcctctacttaagaattcatgtgagggtgaaagtgtatcagaaggtgaaaagaaaaagaagcagcagaacataaatgttcagggagcttatcttcatgtaataggagattctattcagagcataggggtgatgattgggggagctattatatggtataaaccagagtggaaaatcatcgatctaatttgcactctcattttctctgtaattgtgctcaggacaaccattaggatgcttcggagtattcttgaagtattaatggagagtacgcccagagaaattgatgcaacaaggctcgagaaggggctctgtgagatggaggacgttgtcgcaatccatgaattgcacatatgggcaattacagtcggcaaagtgctcctggcttgccatgtcaagattaagtccgacgctgatgctgacacggtgctggataaggtgattgattatattaagagggaatataacattagccatgtaaccattcaaatagaaagagagtaatggcatggaaaagtttattttggctgttctactggtcattggcttctttattctttcgaatagtagtttaaaaggaaaactagatctggttaagcggttccagtatctgtttcagtttggtaaatcatggtttgcattttatggtaatagcaaggcacaaagctcttttgaaatctgattgaatcatgtgaggcaactctggcaggtggcttcgatacatagttacaggttctttcctcaaggctaggttttaaaa

SEQ ID NO: 263 - protein, 418 aa, Nicotiana tabacum
METQNLERGHVIEVRCDMAAQEKGTKICGSAPCGFSDVNTMSKDAQERSASMRKLCIAVVLCIIFMAVEVVGGIKANSLAILTDAAHLLSDVAAFAISLFSLWAAGWEANPRQSYGFFRIEILGALVSIQMIWLLAGILVYEAIARLIHDTGEVQGFLMFVVSAFGLVVNLIMALLLGHDHGHGHGHGHSHGHDHEHGHNHGEHAHSNTDHEHGHGEHTHIHGISVSRHHHHNEGPSSRDQHPHAHDGDHTVPLLKNSCEGESVSEGEKKKKQQNINVQGAYLHVIGDSIQSIGVMIGGAIIWYKPEWKIIDLICTLIFSVIVLRTTIRMLRSILEVLMESTPREIDATRLEKGLCEMEDVVAIHELHIWAITVGKVLLACHVKIKSDADADTVLDKVIDYIKREYNISHVTIQIERE

SEQ ID NO: 264 - DNA, 1457 bp, Populus trichocarpa
agttttggtattgctgtcagttaaattcagatggacgtgcgaaattcagagcatggacgtgtaattgaagtacatgtagatgttccagctgcggagaatagcctgggtgggagtaggatttgtggaggagtatcgtgtggattttcagatgctcagaccagttctaaagatgcaaaggaacgaggggcatccatgaagaaacttgggtgggcagttgggctctgtcttgtcttcatggctgttgaaattgctggaggcataaaagccaatagtcttgcaattttgaccgatgcagctcatcttttatcagatgttgcagcatttgcaatctccttgttttcaatctgggcatccggatgggaggcaactccacgtcggacttatggatattttaggattgagatacttggtgctcttatttccatccagatgatatggcttcttgcaggtatccttgtatatgaagctattgttagaattattcatgatacaggtgaagttaaaggcgcactcatgtttgctgttgctgctgttggcttactggttaatattggcatggcattcttgttgggtcacgaccatggtcacgggcacggtcatggtcacgggcacggtcatgggcacggtcacgagcatggtgagcacaatcatgaccacagtgatgatggccatagccatgagggtgatgatggccatagccatgagggtgatgatggccatagccatgaggatcatgatcatagccatgaggatcatgatcatgcacataaccacatgctgagtggagccactcatcataatcaccaccatcatgaagggagctctgaaaacaatgatgaacatcatcatacacacggagcagatcttgctgagcctctgcttagtactcacacagaagttgacaataaaacaaaaggagggagtaaacaaaagaagcagagaaatatcaatgttcagggggcctatcttcatgtattgggagactcaattcagagtgttggggtgatgattggtggggcaattatatggtataagccagagtggaagattattgatctgatatgcaccctcgcgttttcgataatcgttctaggcacaacaatcggtatgatacggaatattctagaggttctaatggaaagtacaccgagggagattgatgcaactaggcttgagaagggtctctgcgagatggatgaggtggttgccattcatgaactgcacatttgggcaataactgtagggaagtttctgttggcttgccatgttatgatcaagcctgatgctgatgctgacatggtactggacaaggttatagattacattaggagagaacacaatatcactcatgtgaccattcagatagagcgaccgtaaaccgtcagactgggtaagtgcaagttgtattggagtggctttgcctcagctttgaacttttgtaattctttgtcattgat

SEQ ID NO: 265 - protein, 446 aa, Populus trichocarpa
MDVRNSEHRVIEVHVDVPAAENSLGGSRICGGVSCGFSDAQTSSKDAKERGASMKKLGWAVGLCLVFMAVEIAGGIKANSLAILTDAHLLSDVAAFAISLFSIWASGWEATPRRTYGYFRIEILGALISIQMIWLLAGILVYEAIVRIIHDTGEVKGALMFAVAAVGLLVNIGMAFLLGHDHGHGHGHGHGHGHGHGHEHGEHNHDHSDDGHSHEGDDGHSHEGDDGHSHEDHDHSHEDHDHAHNHMLSGATHHNHHHHEGSSENNDEHHHTHGADLAEPLLSTHTEVDNKTKGGSKQKKQRNINVQGAYLHVLGDSIQSVGVMIGGAIIWYKPEWKIIDLICTLAFSIIVLGTTIGMIRNILEVLMESTPREIDATRLEKGLCEMDEVVAIHELHIWAITVGKFLLACHVMIKPDADADMVLDKVIDYIRREHNITHVTIQIERP

SEQ ID NO: 266 - DNA, 1469 bp, Populus trichocarpa
gggcatctactattatactcataatgatttatgatcggctatactattgctttcaataataggaaggagcatttacctatttatataacagataatatggtgagtcataaattaggagaatttgcacctactctcaatttccggggacatgctacggagcatccaccataccagatccatccacatgggcgtgtaaactggaagacaatggaagaacaaaatactcagcatgccccccctgttgaaacaagcgtggatattcttgatggaggggatagtggagcgagtaacgtatgtggggaagcaccttgtgtattttcagatactggaaataacctcaagaatgccaaagaacgttcaacttcaatgcgtaagctctggatagccgtggcactttgtgtagtgttcatgagtgctgaggtagctggtggcatcaaagccaatagtctggcaatcttgactgatgctgcacatttgctttcagatgttgcagcctttgctatctccttgttttcattttgggcagctggctgggaagccacaccccgtcaatcttatggatttgttaggattgaggttctcggtgcactggtttccatacagctcatctggttgcttgcagggattttggtttatgaagccattgttaggctcatccatgatacaggggaggtagatgggtttcttatgtttcttgttgctgcattcggtcttctagtgaatatcgtcatggcacttgtgttgggacatgatcacgggcatgaccatgatcacaatcatgggactggccacagccatggaatgacagttactactcatcatcgtcatcatgacgagcacccaaaagatgcgggcaatcatcataagcactcgaaagatgagcaccgtcatgctcatgaagaacatgttgagccgctgctggataaaaaggaagccaggcatgaaaagaagcaaaggaacataaatgtacaaggagcttatatccatgtacttggggattccatccagagtatcggggtcatgataggaggtgcaattgtatggtataaacctgagtggaagatagttgatgtgatctgcaccctattcttttcagttatagtcttgggtacaacaatcaaaatgcttcggaacatacttgacgtcttgatggagagcactccaagagagatagatgcaacaaagattgaaaagggattgtttgagatggaggacgtggtggctatccacgaactgcatatatgggccattaccgtgggcaagattctcctggcttgtcatgtgaaaatcaggcctgaagcaaatgcagacatggtgctagacaatttgataaactatatcagaagtgagtatagtatcagtcatgtaaccatccagatagaacgttagcagaggcaaaggaattagctagttgaatctggggcctgatgtttccgaaagtgatgatctttcatcacatgcacgcatat

SEQ ID NO: 267 - protein, 452 aa, Populus trichocarpa
MIGYTIAFNNRKEHLPIYITDNMVSHKLGEFAPTLNFRGHATEHPPYQIHPHGRVNWKTMEEQNTQHAPPVETSVDILDGGDSGASNVCGEAPCVFSDTGNNLKNAKERSTSMRKLWIAVALCVVFMSAEVAGGIKANSLAILTDAAHLLSDVAAFAISLFSFWAAGWEATPRQSYGFVRIEVLGALVSIQLIWLLAGILVYEAIVRLIHDTGEVDGFLMFLVAAFGLLVNIVMALVLGHDHGHDHDHNHGTGHSHGMTVTTHHRHHDEHPKDAGNHHKHSKDEHRHAHEEHVEPLLDKKEARHEKKQRNINVQGAYIHVLGDSIQSIGVMIGGAIVWYKPEWKIVDVICTLFFSVIVLGTTIKMLRNILDVLMESTPREIDATKIEKGLFEMEDVVAIHELHIWAITVGKILLACHVKIRPEANADMVLDNLINYIRSEYSISHVTIQIER

SEQ ID NO: 268 - DNA, 1352 bp, Populus trichocarpa
agttttgttattgctgctggttaaattcagatggaagtgcgaaattcagaacatggacgtataattgacatacatgtagatgttccagctgtgaagactagcctgggtgggagtaggatttgtgcgggagcaacatgtggattttcagatgctaaaaccagttctaaagatgcaaaggaacgaggggcgtctatgaagaaacttggatgggcagttgtgctctgtcttatcttcatggctgttgaaattgtaggaggcataaaagccaacagtctcgcgatcttgactgatgcagctcatcttttatcagatgttgcagcttttgcaatctctttattttcaatctgggcatcaggatgggaggcgactccacgccgaacttatggttattttaggattgagatacttggtgctcttatttccatccagatgatatggcttcttgcagggatccttgtgtatgaagctattgccagactgatttacgatacaggtgaagttcagggtgctctcatgtttgctgtttctgctgttggcttactggttaatattgtcatggcactcttgttgggtcatgatcacggtcacgcgcacgggcatggtgggcacgatcatggccacagtgatcatgaccatagccatgaggatcatgatcatacccataccaacagtttaagtggagccacacatcataatcaccaccatcatgaggggaactccgaagacaatggtgagcatcatgacacacatggagcagatcttgctgagcctctgcttagtagtcacacagaagttgaaaataaaacaaatggcgggcataaacaaaagaagcaacgaaatattaatattcagggggcttatcttcacgtattgggagattcaattcagagttttggggtaatgctcggtggggcacttatatggtataagccagggtggaaaatcattgatctgatatgcacccttgtgttttccataattgtgttgggcacaacaatcagtatgctacggaatattctggaggttctcatggagagcaccccgagggagattgacgcaactacgcttgagaagggtctctgcgaaatggacgaggtggttgccgtccatgaactgcacatttgggcaataactgtagggaagtttttgttggcttgccatgttatgatcaagcctgatgctgatgctgacatggtgctagacaaggttatagattacattaagagagaacacaatatcagtcatgtgaccattcagatagagcgacagtaaccatttagatgggggcaagtacaagttacatttcagtggcttagcgtcagttttgaacttttacttttaattctttgtca

SEQ ID NO: 269 - protein, 413 aa, Populus trichocarpa
MEVRNSEHGRIIDIHVDVPAVKTSLGGSRICAGATCGFSDAKTSSKDAKERGASMKKLGWAVVLCLIFMAVEIVGGIKANSLAILTDAAHLLSDVAAFAISLFSIWASGWEATPRRTYGYFRIEILGALISIQMIWLLAGILVYEAIARLIYDTGEVQGALMFAVSAVGLLVNIVMALLLGHDHGHAHGHGGHDHGHSDHDHSHEDHDHTHTNSLSGATHHNHHHHEGNSEDNGEHHDTHGADLAEPLLSSHTEVENKTNGGHKQKKQRNINIQGAYLHVLGDSIQSFGVMLGGALIWYKPGWKIIDLICTLVFSIIVLGTTISMLRNILEVLMESTPREIDATTLEKGLCEMDEVVAVHELHIWAITVGKFLLACHVMIKPDADADMVLDKVIDYIKREHNISHVTIQIERQ

SEQ ID NO: 270 - DNA, 1292 bp, Populus trichocarpa
ggtattcgtgatgttgctgtgaactttcagatggaagcacaaaatcctcagcatgggcatccagttgaaataagcgtggatattcttgatggagagatgagtggaggaagcaagggatgcggggaagcaccttgtggattttcagatactggaaataactccaagaatgccaaagaacgttcagcttcaatgcgcaagctctggatatccgtggcactttgtatagtcttcatgagtgctgaggtagctggtggcatcgaagctaatagtctggcaatcttgactgatgctgcacatttgctttcagatgttgcaggctttgctatctccttgttttctttatgggcagctggctgggaagccacaccccgccaatcttatggattttttaggattgagattctcggtgcattggtttccatgcagctcatctggttgcttgcagggattttggtgtatgaaaccattattaggctcatccatggtactagtgaggtaaatgggttccttatgtttcttgttgctgcatttggccttctggtgaacatcataatggctcttgtgttgggacatgatcatgggcctgaccatgatcacaaacatgggactggccacagccatggaaccacagttagtactcataaccatcatcacgtggagcacccaaaacatgatgacaatcatcatgaccactcgaacaatgagcaccatcatgctcatgaagatcatgttgagccgctgctggataaaggggaagccatgcatgaaaagaagcaaaggaacataaatgtacaaggagcttatctccatgtacttggggattccatccagagtattggggtaatgatcggaggtgcaattatatggtataagcctgagtggaagataattgatctgatctgcaccctaatcttttctgttatagttttgggtacaacaatcaaaatgctacggaacatacttgaagtcctgatggagagcactccaagagagatagatgctacgaagattgaaaagggtctgctggagatggaggaggtgatggctatccacgaactgcatatatgggccattaccgtgggcaagattctcttggcttgtcatgtgaaaatcatgcccgaagcaaatgcagacatggtgctagacaatgtgatcagctatctcagaagggaatacaatataagtcatgtaaccatccagatagagcgttagcagaggtaaaggaatttactagttgaatctggggcgtgatgtttctgagagttatgctttttcaatcacatgaacgcata

SEQ ID NO: 271 - protein, 393 aa, Populus trichocarpa
MEAQNPQHGHPVEISVDILDGEMSGGSKGCGEAPCGFSDTGNNSKNAKERSASMRKLWISVALCIVFMSAEVAGGIEANSLAILTDAAHLLSDVAGFAISLFSLWAAGWEATPRQSYGFFRIEILGALVSMQLIWLLAGILVYETIIRLIHGTSEVNGFLMFLVAAFGLLVNIIMALVLGHDHGPDHDHKHGTGHSHGTTVSTHNHHHVEHPKHDDNHHDHSNNEHHHAHEDHVEPLLDKGEAMHEKKQRNINVQGAYLHVLGDSIQSIGVMIGGAIIWYKPEWKIIDLICTLIFSVIVLGTTIKMLRNILEVLMESTPREIDATKIEKGLLEMEEVMAIHELHIWAITVGKILLACHVKIMPEANADMVLDNVISYLRREYNISHVTIQIER

SEQ ID NO: 272 - DNA, 1820 bp, Oryza sativa
gcatcctaccccccgttctctcctccccatctccaacgcacgcacgcgccatcaccaccacctcgacgccggcggcgacgaccacggcgacggcaacggcggcggcggcagagaagccctcctcatccccaagatggacagccataactcagcacctccccagattgctgaagtgagaatggacatctcatcatctacttctgtagcagctgggaacaaagtttgcagaggtgctgcttgtgacttttctgattccagtaatagctcaaaagatgcaagggagagaatggcgtcaatgaggaagctcattattgctgtgatcctttgcatcatattcatggcggtcgaagtggttggaggtatcaaagcaaacagtttggcaatcttgactgatgcagcccatctcctttcggatgttgcggcctttgccatatctttgttctctctttgggcagctggatgggaagctacaccacagcagtcatatgggtttttccgtatagaaattcttggtgccctggtttctattcagctcatatggctccttgctggtattcttgtctatgaagctattgtaaggctcattaatgaaagtggtgaggtccagggctccctcatgtttgctgtctcagcatttggcttatttgttaacatcataatggctgtcttgcttggtcatgaccatggacatggacacggacatggtcatgggcatggacattcccatgaccatgatcatggtggttctgaccatgaccatcaccaccatgaagatcaagagcatggccatgtacatcaccacgaagatggccatggtaattcaattaccgtcaatctccatcaccatccaggcactggacaccaccaccatgatgctgaggaaccattgctcaagagtgatgctggttgtgacagcacccaatctggtgccaaggatgccaagaaggctcgtcgtaatatcaatgtacacagtgcttatctgcatgtgcttggggattcaatccagagcatcggtgtgatgattggaggggctatcatctggtacaagcccgagtggaagattattgatctcatctgcaccctcatcttctccgtgatcgtactcttcaccacaatcaagatgctgcgcaacatccttgaggtcctgatggagagcacgccccgcgagatcgatgccaccagccttgagaatggcctccgcgacatggacggtgtggttgcagtacatgagctgcacatctgggccataacggtggggaaggttctcctggcgtgccatgtgacaatcactcaggacgcagacgctgatcaaatgctggacaaggtgattgggtacatcaagtctgagtacaacatcagccatgtgaccattcagattgagcgcgagtaggcttgaccgcttgagacaggtaggtagtgttgatgatagaacggatcatcttcatctcatctcatgggaccaacttatcaggaacctgtttcactggttttatgcagttactgttagctctgcagtgcaaatcagatcagcagagtccaacaattcctgcaggttcatctgaatgttagcttctgatgctgtttattactataagtacgtgttattagtactatcttagtcaattaggtgagttgatgttaatcagtttcgtagtcggttgtattcacatgggtgcagttttcagacaagttttcaggcacctgtgagtacgtcaacctgccttctgcgtctgtagtctagcgcccagccgtactagtttttatgtaaatctgcactggcatgggaaataataaccaagtttcgtttggccttataatga

SEQ ID NO: 273 - protein, 418 aa, Oryza sativa
MDSHNSAPPQIAEVRMDISSSTSVAAGNKVCRGAACDFSDSSNSSKDARERMASMRKLIIAVILCIIFMAVEVVGGIKANSLAILTDAAHLLSDVAAFAISLFSLWAAGWEATPQQSYGFFRIEILGALVSIQLIWLLAGILVYEAIVRLINESGEVQGSLMFAVSAFGLFVNIIMAVLLGHDHGHGHGHGHGHGHSHDHDHGGSDHDHHHHEDQEHGHVHHHEDGHGNSITVNLHHHPGTGHHHHDAEEPLLKSDAGCDSTQSGAKDAKKARRNINVHSAYLHVLGDSIQSIGVMIGGAIIWYKPEWKIIDLICTLIFSVIVLFTTIKMLRNILEVLMESTPREIDATSLENGLRDMDGVVAVHELHIWAITVGKVLLACHVTITQDADADQMLDKVIGYIKSEYNISHVTIQIERE

SEQ ID NO: 274 - DNA, 1326 bp, Thlaspi caerulescens
gcccaacggagagaccgagagagcaaaggaagggaagggacccagaaaagatggagtcttcaagtcacatcattgaggttaatggaggaagatctgatgaagaaagaagggctgtggcaagtaaagtctgtggagaggcaccgtgtgggttctcagatgccaagaatgtttcaggggataccaaagaacgcaatgcttctatgcggaagctctgtatcgcggtggtgttatgtcttgtgttcatgagcgttgaaatcgttggtggaatcaaagccaatagtttggctataatgacagatgcagcacatttgctctctgacgttgctgcctttgccatctctctcttcgccttgtgggctgctggttgggaagcgacgccgaggcagacttacgggttcttcaggattgagatcttgggagctcttgtgtctatccagctcatttggttgcttactgggatcttggtttatgaagccatatcaaggcttcttaccgagaccagtgaggttaatggattccttatgtttgctgttgctacgtttggtctgctggtgaatatcataatggctgtgatgcttgggcatgatcatggtcatagtcatggtcatggtcatgaccatgaaaaccatagccatggggtgactgttaccactcatgatcatgatcccactcatgatcatgatcatgatcatgatcacgatgatggtcatggtcatagtcatggagaggacaatcaggatgaagctcatggagacgttactgagcagctgttggagaaaccaaagcaggagaaagagaaaaagaaaaggaacatcaatttgcaaggagcttatcttcatgttcttggtgattcaatccagagcgttggtgttatgattggaggagctgccatttggtacaacccgaaatggaagataattgatctgatctgcactcttgccttttcggttatcgtcttggggacaaccatcaacatgattcgaaacattcttgaagtgttgatggagagtacgcctagagagattgacgctacaaagctcgaaaagggtttgctcgaaatggaagaagtggtggctgttcatgagcttcacatttgggctatcacagtgggaaaggttttacttgcttgccatgtcaatgttacaccacaagcagatgcagatatggtgctcaacaaggtggttgattacatccgcagagagtacaatatcagtcatgtaaccatacaaatcgagcgctgaaagcaaagcaaagcaaaagctaagatcttgatgtgttttttgtatcagcattctcattatcaataattttttctaccctttttgc

SEQ ID NO: 275 - protein, 396 aa, Thlaspi caerulescens
MESSSHIIEVNGGRSDEERRAVASKVCGEAPCGFSDAKNVSGDTKERNASMRKLCIAVVLCLVFMSVEIVGGIKANSLAIMTDAAHLLSDVAAFAISLFALWAAGWEATPRQTYGFFRIEILGALVSIQLIWLLTGILVYEAISRLLTETSEVNGFLMFAVATFGLLVNIIMAVMLGHDHGHSHGHGHDHENHSHGVTVTTHDHDPTHDHDHDHDHDDGHGHSHGEDNQDEAHGDVTEQLLEKPKQEKEKKKRNINLQGAYLHVLGDSIQSVGVMIGGAAIWYNPKWKIIDLICTLAFSVIVLGTTINMIRNILEVLMESTPREIDATKLEKGLLEMEEVVAVHELHIWAITVGKVLLACHVNVTPQADADMVLNKVVDYIRREYNISHVTIQIER

SEQ ID NO: 276 - DNA, 2083 bp, Zea mays
cgctgttcgagcagagccccatcccctgatccccgtgccaggccgctcggccctcgacgccgtgagtcaggcaggcaggcgcctctttctgtccctccactcgggtctccacgccgccgccgccgccgccgcctcgaccgccccacgcatccgccgctcctctacccatcctcggcccgcggcccagggagaagaccgcacgggcgggcgagatggaaaaccataatccattacattctcagattgctgaagtgaaaatggacatctcagcatcagcttctgttgcatcagggaacaaattctgcaagggtggtgcctgtgatttctctgattccagtaactcctcgaaagatgccaaggagagatccacgtccatgaggaagcttataatcgcagtgatcctttgcatcatattcatgacggtggaagtggtcgggggcatcaaagcaaacagtcttgccatcttaactgatgcggcgcaccttctttctgatgtggcagcatttgccatatcgttattctctctctgggctgctggatgggaagcaacaccgcagcagtcatatgggttcttccggattgagattcttggtgccttggtctccattcagctcatatggctacttgctggcatactggtatatgaggctattgtaaggctcattaacgagagtggcgatgtgcagggctccctcatgtttgctgtgtcggcgtttggactgtttgtcaacattataatggctgtattgctaggccatgaccacgggcacggccatggacacagccatggacatccacatgaccatggtcatggtgattcagacgatggccattctcaccatgaagaaccagaacagggccatgttcatcatcatgagcatagccatggaagttctattactgtcacaacacatcaccaccaccactcaggcactggacaacaccatgacgctgaggagccactgatcaagcacgaggccgactgtgagggcacccaatctgctgctaagaagcctcgacgcaatataaacgtacacagcgcttaccttcatgtgcttggggactccatccagagcatcggggtgatgatcggcggggctatcatctggtacaagcccgagtggaaaatcatcgatctgatctgcaccctcatcttctcggtggtcgtgctgttcaccacgatcaggatgctgcgcaacatcctcgaggtcctgatggaaagcacgccccgtgagatcgacgccaccaggctggagagggggctctgcgagatggaaggcgtggttgccgtccacgagctgcatatctgggccatcacagtggggaaggtgctactggcttgccatgtgacggtcgccagggaagccgacgcagacgagatccttgacaaggtgattgggtacatcaagacggagtacaacatcagccatgtgaccattcaggtcgagcgtgaatagagggggagctgtcttttgggctgtcagggcataaatggcgtcacgccttcactggttatcttactctgtcggttaaaacttttttttggcacctgggaaggcatcaggcagccatcggagtcttgatgtgcttgcaagttcatctgtggttcaagctttgatggtcagtagtgttatctgttactactagtctattaggcgggggtaggcgtcaaccagtgtgtacgggtttgattttcggtcatgctgttaacagcattgcggttcgtcgaactggatatgtagtttagtacgctgtgtcatcacctcttgtgtaagggaacgcttcttttctgtggtatggaagatgtgaacttcgtgattggcctgttaccgtttgtactgagcatgcttggacgtgttctctcggttgactcgactgtatgcttatggatgggggtctcaagcagatttgttgcacaattgaagccagccagatatccctctgtgcagattttcagataactgacaaaggctatacaccccgacagaacaactagcaagcaattcatgcataatctcaccagatagtgcgatgatctgtaaagagttgtccccccaaaagagaataagaggttgtttgtttg

SEQ ID NO: 277 - protein, 414 aa, Zea mays
MENHNPLHSQIAEVKMDISASASVASGNKFCKGGACDFSDSSNSSKDAKERSTSMRKLIIAVILCIIFMTVEVVGGIKANSLAILTDAAHLLSDVAAFAISLFSLWAAGWEATPQQSYGFFRIEILGALVSIQLIWLLAGILVYEAIVRLINESGDVQGSLMFAVSAFGLFVNIIMAVLLGHDHGHGHGHSHGHPHDHGHGDSDDGHSHHEEPEQGHVHHHEHSHGSSITVTTHHHHHSGTGQHHDAEEPLIKHEADCEGTQSAAKKPRRNINVHSAYLHVLGDSIQSIGVMIGGAIIWYKPEWKIIDLICTLIFSVVVLFTTIRMLRNILEVLMESTPREIDATRLERGLCEMEGVVAVHELHIWAITVGKVLLACHVTVAREADADEILDKVIGYIKTEYNISHVTIQVERE

SEQ ID NO: 278 - DNA, 2194 bp, Oryza sativa; identical to SEQ ID NO: 188

SEQ ID NO: 279 - DNA, 56 bp, Artificial sequence
  primer: prm09216
ggggacaagtttgtacaaaaaagcaggcttaaacaatggagtcttcaagtccccac

SEQ ID NO: 280 - DNA, 50 bp, Artificial sequence
  primer: prm09217
ggggaccactttgtacaagaaagctgggttagcttttagcgctcgatttg

SEQ ID NO: 281 - DNA, 1513 bp, Oryza sativa
tttgtacaaaaaagcaggcttaaacaatggctgtcactagaattggtcttgctggccttgcggtcatggggcagaaccttgccctcaacattgcagagaaagggttccctatctctgtctacaacaggacgacttctaaggttgatgagaccgttcagcgcgccaaggtagaaggaaaccttcctgtgtacgggttccatgaccctgcatcctttgtgaactccattcagaagccacgtgttgtcatcatgcttgtcaaggctggtgcaccagtggaccagaccattgcaactcttgcagcacacttggagcagggtgactgtattattgatggaggaaatgagtggtacgagaacactgagaggagggagaaggcaatggaggagcgtggcctcctctatcttgggatgggtgtttccggaggagaggagggtgcccgcaatggcccgtccttgatgcctggtggctcattcgaggcgtacaagtacattgaagatattcttctcaaggtggctgcccaggttcctgatagtggcccgtgcgtcacatacattggcaaaggtggatctggaaactttgtcaagatggttcacaacggaattgagtatggtgacatgcaactgatttctgaggcatatgatgttctcaagtcagttggtaagctcacaaacagtgagctgcagcaggtgttttctgagtggaacaagggtgagctcctcagtttcctgattgagatcacagccgacatatttagcatcaaggatgaccagggttcaggccacctggtcggcaaggtcctggacaagactgggatgaagggaactgggaagtggactgtgcagcaggccgcagagctttctgtggctgctcctacaattgaggcatccttggattccaggttcctcagtgggttgaaggatgagcgtgttgaggctgccaaggtcttccaaggtgacttctccagcaacttgccagtggacaaggcacagctgattgaagacgtgaggcaggctctttacgcctcgaagatctgcagctacgctcagggcatgaacatcatcaaggccaagagcatggagaaagggtggagcctcaacctcggtgagctagcgaggatctggaagggagggtgcatcatccgtgccatcttcctggaccgcatcaagaaggcctacgacaggaactccgacctcgccaacctgctcgtggaccctgagttcgctcaggagatcatggacaggcaagcggcatggcgcagggtggtctgccttgccatcaacaatggcgtcagcaccccaggcatgtcggcgagtctcgcgtacttcgactcctaccggagggacaggctgcctgccaacctggtgcaggcacagagggactatttcggggctcacacctacgagagggtcgacatgcccggctccttccacaccgagtggttcaagatcgcgcgtgctgctaagatgtgaaatgcttcaaattttcggtaatacccagctttcttgtacaaagt

SEQ ID NO: 282 - protein, 480 aa, Oryza sativa
MAVTRIGLAGLAVMGQNLALNIAEKGFPISVYNRTTSKVDETVQRAKVEGNLPVYGFHDPASFVNSIQKPRVVIMLVKAGAPVDQTIATLAAHLEQGDCIIDGGNEWYENTERREKAMEERGLLYLGMGVSGGEEGARNGPSLMPGGSFEAYKYIEDILLKVAAQVPDSGPCVTYIGKGGSGNFVKMVHNGIEYGDMQLISEAYDVLKSVGKLTNSELQQVFSEWNKGELLSFLIEITADIFSIKDDQGSGHLVGKVLDKTGMKGTGKWTVQQAAELSVAAPTIEASLDSRFLSGLKDERVEAAKVFQGDFSSNLPVDKAQLIEDVRQALYASKICSYAQGMNIIKAKSMEKGWSLNLGELARIWKGGCIIRAIFLDRIKKAYDRNSDLANLLVDPEFAQEIMDRQAAWRRVVCLAINNGVSTPGMSASLAYFDSYRRDRLPANLVQAQRDYFGAHTYERVDMPGSFHTEWFKIARAAKM

SEQ ID NO: 283 - protein, 175 aa, Artificial sequence
  domain 6PGD
TRIGLAGLAVMGQNLALNIAEKGFPISVYNRTTSKVDETVQRAKVEGNLPVYGFHDPASFVNSIQKPRVVIMLVKAGAPVDQTIATLAAHLEQGDCIIDGGNEWYENTERREKAMEERGLLYLGMGVSGGEEGARNGPSLMPGGSFEAYKYIEDILLKVAAQVPDSGPCVTYIGK

SEQ ID NO: 284 - DNA, 56 bp, Artificial sequence
  primer 11
ggggacaagtttgtacaaaaaagcaggcttaaacaatggctgtcactagaattggt

SEQ ID NO: 285 - DNA, 50 bp, Artificial sequence
  primer 12
ggggaccactttgtacaagaaagctgggtattaccgaaaatttgaagcat

SEQ ID NO: 286 - DNA, 2194 bp, Oryza sativa; identical to SEQ ID NO: 188

SEQ ID NO: 287 - DNA, 1809 bp, Aquilegia formosa
gtttgtgtgtcgttgaacacttgaagtgaatttgatttccaacaacaacaacaaaaatcgaaattctatatttaacttgatcgaaatcttagattttcttagttactgagatttctcaaccaatcttacaagtcttcagttctgaaagaaagaaagaaaatggcaacccccccttcttctagtctctcaagaattggcctagcaggccttgcagtaatggggcaaaatcttgcactcaacattgcagagaaagggtttccgatttctgtttacaatcgaactacctctaaagttgatgagactgttgagcgagctaagagggaaggagatctacctttgtttggtttccatgatcctgaatcctttgttaattcaattcaaaagcctagggttataattatgcttgttaaggctggtgcccctgttgaccaaacaatcaaaactctttctgtttacatggaaaaaggtgattgtattattgatggtggtaatgagtggtatgaaaacactgagaggagggagaaggctatggctgaattaggtttactttatttaggaatgggagtatcaggtggtgaagagggtgcaagacgtgggccttccatgatgccgggtgggtccttcgaggcctataagaacattgaagacatactaatcaaggtggcagctcaggttcctgatagtggcccatgtgttacttacatagggaagggaggatctggcaattttgttaagatggttcacaatgggattgaatatggtgatatgcaactgattgctgaggcttatgatgtgctgaaatcagttgggaagctatccaatgaagaattacactctgtgttctcagagtggaacaagggagaacttctgagtttcttgattgagatcacagcagatatctttaaaatcaaggatgacaagggggaaggacatttggttgacaaagttttggacaaaactggtatgaagggtactggaaagtggaccgtgcagcaagctgcagacctctcaattgcagctccaaccatagcgtcatctttggatgcaaggttccttagtgggttgaaggaagaaagagttgaagctgctaaaatctttaaatcaggtggctttggtgacatattgactgatcaagtagtcaacaaggagaaattgattgatgatgtcagacaagctctttatgcagccaaaatctgtagctatgctcaggggatgaatttgatacgtgcaaaaagtatcgagcaaggatgggacctgaagttaggggagcttgcaaggatttggaagggaggttgcatcatccgtgctgtctttctggaccgtatcaagaaggcctatgataggaaccctgatcttgcaaaccttcttgtggacccagaattcgcaaaggagatgattgaccgtcagtctgcttggcgacgagttgtctgtcttgctatcaattcaggaatcagtaccccgggtatgtcaaccagtcttgcttatttcgatacttacaggagagctagacttccagcaaatttggtccaagctcaaagagattactttggggctcacacttacgagaggactgatgtgccaggatcgttccatactgaatggttcaagattgctaaaggttcaaaaatttgaacattctgtttgtttccttttaattagtgtaatgatttcctttgaacaaaataatgatcccttgggacagatatattttgtagaagtattgtgaaaccattgtgtggaatcattgtccgaattgaatttcagattcaatgaaaatttccatttgtttttttgtctgctgtacactgt

SEQ ID NO: 288 - protein, 490 aa, Aquilegia formosa
MATPPSSSLSRIGLAGLAVMGQNLALNIAEKGFPISVYNRTTSKVDETVERAKREGDLPLFGFHDPESFVNSIQKPRVIIMLVKAGAPVDQTIKTLSVYMEKGDCIIDGGNEWYENTERREKAMAELGLLYLGMGVSGGEEGARRGPSMMPGGSFEAYKNIEDILIKVAAQVPDSGPCVTYIGKGGSGNFVKMVHNGIEYGDMQLIAEAYDVLKSVGKLSNEELHSVFSEWNKGELLSFLIEITADIFKIKDDKGEGHLVDKVLDKTGMKGTGKWTVQQAADLSIAAPTIASSLDARFLSGLKEERVEAAKIFKSGGFGDILTDQVVNKEKLIDDVRQALYAAKICSYAQGMNLIRAKSIEQGWDLKLGELARIWKGGCIIRAVFLDRIKKAYDRNPDLANLLVDPEFAKEMIDRQSAWRRVVCLAINSGISTPGMSTSLAYFDTYRRARLPANLVQAQRDYFGAHTYERTDVPGSFHTEWFKIAKGSKI

SEQ ID NO: 289 - DNA, 1820 bp, Aquilegia formosa
gtcagctatttctctttctctgtcaaaaagcttgtgttcagtcaatcgaaattcatccattgttctgaatcttgctgttttcttctctatataattcgattcaaacatccattttctacaatacccatttcttagatttcgtttattgcacagatatctcaacaaatcttcaaatttcttataagaaaatatggctgctccttcgcaaaatctctcaagaataggccttgcaggactggctgtaatgggacaaaatcttgccctcaacattgctgagaaaggattcccaatctctgtttacaaccgaaccacctccaaagtcgatgagactgtcgaacgagccaaaaaggaaggcaatctccctttatatggcttccatgaccctgagtcctttgttcagtcgatccaaaaacctcgagtgataatcatgcttgttaaggctggggcaccagttgaccaaactatcaaaacactctcagtttacatggagaagggtgattgtataattgatggtggtaatgagtggtacgagaacactgagaggagagaaaaggcaatggctgaattgggtctactctatctcggaatgggagtttcaggtggtgaagagggtgccagaaatggaccttctatgatgcctggaggatcatatgaggcctacaagtatattgaagacattcttcttaaggtgtcagcccaagttcctgacagtggtccatgtgttacttacataggcaaagggggatcaggcaatttcgttaagatggtccacaatgggatcgaatatggtgatatgcaactgatttctgaagcttatgatgtactaaaatcagttgggaagctttccaatgaggaattacaccatgttttttcagagtggaacaagggggaacttcttagcttcttagtcgagattactgctgatatttttaagattaaagatgacaagggagaaggatatctggttgacaaggttttggacaagactggcatgaagggtactggaaaatggacggttcagcaagctgccgatctatcaattgcagctccaacaatagcttcgtctttagatgcaaggttccttagtgggttgaaggatgagagagtagaagctgccaatgtcttcaaatctggaggttttggtgacattttaactgatcaaactgtggataaggagaaattaattaatgacgtaaggcaagctctttatgcagccaagatctgtagttatgcacagggaatgaatctcatccgtgcaaagagcgtcgaacagggttgggacttgaagttgggagagttggccagaatttggaagggaggctgcattatccgtgctgtgtttttggatcgtattaagcaagcctatgacaggaatgctgatcttgcaaatcttcttgtcgatcccgagtttgctaaggagatgattgaacgacagtctgcttggcggcaagtagtttgtcttgctatcaactctggcatcagcactcctggtatgtcatccagtcttgcatactttgacacttacaggagggctaggctccctgctaatttggtccaagcccagagagattactttggagctcacacctatgaaaggactgacataccaggatccttccatactgagtggtttaagcttgctaaacaatcttagaactaagccttcgcatatgtctaatatattgggttcagctttcaccacaccaatgttgaaatctagtgtcccaaattagtttgataaattcttgtctgtgttcgtctttttctgtatttttgtcatttgctgctttctagttgtctgatgtactctgtcctttgat

SEQ ID NO: 290 - protein, 487 aa, Aquilegia formosa
MAAPSQNLSRIGLAGLAVMGQNLALNIAEKGFPISVYNRTTSKVDETVERAKKEGNLPLYGFHDPESFVQSIQKPRVIIMLVKAGAPVDQTIKTLSVYMEKGDCIIDGGNEWYENTERREKAMAELGLLYLGMGVSGGEEGARNGPSMMPGGSYEAYKYIEDILLKVSAQVPDSGPCVTYIGKGGSGNFVKMVHNGIEYGDMQLISEAYDVLKSVGKLSNEELHHVFSEWNKGELLSFLVEITADIFKIKDDKGEGYLVDKVLDKTGMKGTGKWTVQQAADLSIAAPTIASSLDARFLSGLKDERVEAANVFKSGGFGDILTDQTVDKEKLINDVRQALYAAKICSYAQGMNLIRAKSVEQGWDLKLGELARIWKGGCIIRAVFLDRIKQAYDRNADLANLLVDPEFAKEMIERQSAWRQVVCLAINSGISTPGMSSSLAYFDTYRRARLPANLVQAQRDYFGAHTYERTDIPGSFHTEWFKLAKQS

SEQ ID NO: 291 - DNA, 1828 bp, Aquilegia formosa
tttcctttcaacaaagcttcctttctcagctctactgactttggaagctcgtttctttattccggtgatttcaattcattttccgatatcaaacgagttattagccatggacgcatcagcagcaggtctctcacgcattggactagctggtctagctgtcatgggtcagaatcttgctctcaacatagcggataaaggattccccatctctgtttacaatcgtacaacttctaaagtcgatgaaaccctagaacgagctaagcacgaaggagatctccctctcactggtcattattcaccacgtgatttcgttctctccatccaacgacctagatctgtcgtcatcctcgtcaaagccgggtcccctgtggatcagacaatttctgctctctctgagtacatggagtcaggtgacacaatcattgatggtggcaatgaatggtatgagaataccgagcgccgtatgcgtgaagttgctgataaaggtattctttatttgggcatgggtgtgtcaggcggtgaagagggtgccaggaatggaccttcccttatgcccggtggatcctaccaagcttacttgaatgttgaagacattgtgaaaaaggttgctgcacaagtggaggatggcccttgcgtcacctacataggtgaaggtggctcaggtaattttgttaagatggtccacaatggcattgaatatggtgacatgcaattgatttcagaggcttatgatgtgttaaagaatgttggaggactgtccaattccgagttggcagacatttttgctgagtggaatagaggagagcttgaaagctttttgattgagataacggctgatatatttaaggtacaagatgaacatggtaatggcgaattagttgataaaattttggataagacggggatgaaggggacagggaaatggacggttcagcaggcagccgaattgtctgttgctgctccaaccattgctgcgtctttggattgtcggtatttgagtggtttgaaagaggagagagaggttgccgctgcagttttgaaggaagcaggcatgcaggacgtgtttggagctgcgatgccaaatattgataagaagagattgattgatgatgttagacaagcgttgtatgcatcaaagatatgtagttatgcgcaaggaatgaacttgctgagagccaagagtgtagagcaaagttggaatctcaactttggtgaactagcaaggatttggaaaggtggttgtattatacgggctgtgttcttggaccgaattaagaaagcgtaccaaaggaatccacaattggcaagtttgattgttgatccagactttgcaaaggagatggtgcagaggcaggcagcgtggagaagggttgtagggttggctatccaagcagggattagcactccaggaatgtgtgctagccttgcttattttgacacctataggcgtgcgagacttcctgcaaaccttgtccaggcacagagagatttgtttggggctcatacatatgaacgcattgatcgtccaggagccttccacactgagtggacaaagcttgcaaggcagggcaagactggtatgggtgttttacactgagtttatcttctacattcttgcaattcggattggttaaaatgggttgacattgttcgttaattttaattgggcgagttgcacaatgtattcactgcctaggcctttatagttgttgttttgccttgaagtttttgttgtcaataagagatgcatctgcctattgagcttggttcggctatattgtgatttttctatgaattctgtcctttgcaatagatgtagataaggaaa

SEQ ID NO: 292 - protein, 496 aa, Aquilegia formosa
MDASAAGLSRIGLAGLAVMGQNLALNIADKGFPISVYNRTTSKVDETLERAKHEGDLPLTGHYSPRDFVLSIQRPRSVVILVKAGSPVDQTISALSEYMESGDTIIDGGNEWYENTERRMREVADKGILYLGMGVSGGEEGARNGPSLMPGGSYQAYLNVEDIVKKVAAQVEDGPCVTYIGEGGSGNFVKMVHNGIEYGDMQLISEAYDVLKNVGGLSNSELADIFAEWNRGELESFLIEITADIFKVQDEHGNGELVDKILDKTGMKGTGKWTVQQAAELSVAAPTIAASLDCRYLSGLKEEREVAAAVLKEAGMQDVFGAAMPNIDKKRLIDDVRQALYASKICSYAQGMNLLRAKSVEQSWNLNFGELARIWKGGCIIRAVFLDRIKKAYQRNPQLASLIVDPDFAKEMVQRQAAWRRVVGLAIQAGISTPGMCASLAYFDTYRRARLPANLVQAQRDLFGAHTYERIDRPGAFHTEWTKLARQGKTGMGVLH

SEQ ID NO: 293 - DNA, 1809 bp, Arabidopsis thaliana
ggctccatcgacgagtccgtcattttcacagtataaatatctccacccactctctctcatcactcccactacctcatttttctctctctacctaaccaatcctaagctcatctctctatctccaatggagtccgccgcactatcccgaatcggtctcgccggactcgccgtgatgggccaaaacctcgccttaaacatcgccgagaaaggtttcccaatctcagtctacaatcgaaccacttccaaagtcgacgaaaccctagatcgagccgccgtcgaaggaaacctcccagtctccggccaatactctccccgcgatttcgtcctctcgatccaacggcctagatctctcatcatcctcgtcaaagctggagctcccgttgaccaaacaatcgacgccttctccgaatacatggagccaggagattgcatcatcgacggtggaaacgaatggtatcagaacacagagcgacggatctccgaagctgagcaaaaaggattgctctatttaggtatgggagtctccggcggcgaagaaggagctcgtaacggtccttcgttaatgcctggtggatcatttcaagcttatgataacatcaaagatattttggagaaagtcgcagctcaagttgaagatggaccttgtgttacttacatcggagaaggtggatctggaaatttcgtgaagatggttcataatgggattgagtatggagatatgcaattgatctctgaagcttatgatgtgttgaagaacgttggtggattaagcaacgaggagcttgctgagattttcactgagtggaattcaggtgagcttgagagtttcttggttgagataacttctgatatatttagggttaaggatgagtttggtgatggagagttagttgataagattttggataagactggtatgaaaggtactgggaaatggacggtgcagcaagcggcggagctgtctgttgcagctccgacgattgctgcttcgttggattgtaggtatttgagtgggttgaaagatgagagggagaatgcagcgaaagtgttgagggaagctggattgaaagaagagattggttctgcgtcgagtggaatcgataagaagagattggttgatgatgttaggcaagctttgtatgcttccaagatttgtagttatgctcaagggatgaatttgcttagagctaagagtttagagaagagttggaacttgaattttggtgaattggctaggatttggaaaggtggttgtattataagagcggttttcttggataggatcaagaaagcttaccagaggaacccggacttggctagtcttgtggttgatcctgagtttgctaaagagatggttcagagacaagctgcttggagaagagttgttggtttggctgtttctgctgggattagcacgcctggaatgtgtgctagtcttgcgtatttcgatacttatagacgtgctagattgccggcgaatctggttcaggcgcagagagatctctttggagctcacacttatgagagaaccgatcgtcctggtgcgtaccatactgaatggactaagcttgccaggaagaaccattgaaaaatccctttctgtttttgtaaaagccctatttgtcttgcttatttttgagcaattggaaatgggatttcaaaccacattgtttaacacgagtattttgttcagatttcagaataagaaatgcagcagcaccttgatttttgtttttgtttctgaacatctttgcttttaaatttgtaaaacatatctcccctgtctttaatagatcgaatgtctagacg

SEQ ID NO: 294 - protein, 487 aa, Arabidopsis thaliana
MESAALSRIGLAGLAVMGQNLALNIAEKGFPISVYNRTTSKVDETLDRAAVEGNLPVSGQYSPRDFVLSIQRPRSLIILVKAGAPVDQTIDAFSEYMEPGDCIIDGGNEWYQNTERRISEAEQKGLLYLGMGVSGGEEGARNGPSLMPGGSFQAYDNIKDILEKVAAQVEDGPCVTYIGEGGSGNFVKMVHNGIEYGDMQLISEAYDVLKNVGGLSNEELAEIFTEWNSGELESFLVEITSDIFRVKDEFGDGELVDKILDKTGMKGTGKWTVQQAAELSVAAPTIAASLDCRYLSGLKDERENAAKVLREAGLKEEIGSASSGIDKKRLVDDVRQALYASKICSYAQGMNLLRAKSLEKSWNLNFGELARIWKGGCIIRAVFLDRIKKAYQRNPDLASLVVDPEFAKEMVQRQAAWRRVVGLAVSAGISTPGMCASLAYFDTYRRARLPANLVQAQRDLFGAHTYERTDRPGAYHTEWTKLARKNH

SEQ ID NO: 295 - DNA, 1828 bp, Arabidopsis thaliana
actttggtagcagtggtgcgaatcagaccgttcatttgctatatatctgctacaaacaaacatcactaatctctgcaatttttactctcctccttcacgtcttttcctcttaattttttctaggaaaattctcaaatccatctccgcgatacgaacagagagaagaagacttagaaaaatggctgttcaacctacaagaataggtctagctggacttgctgtgatgggtcagaacctagctctcaacattgcagagaaaggcttcccaatctctgtttacaacagaactacttccaaagttgatgagaccgtcgaacgagccaaaaaggaaggcaatcttcctctttacggcttccatgaccccgagtcttttgtcaagtccattcagaagccacgcgttattatcatgcttgttaaggctggttctcccgttgaccagaccatcaagaccctctctgcttatttggagaaaggtgactgtattgtcgatggtggtaatgaatggtatgagaacactgagaggagagaaaaagccgtggcggagaacggtttcctctaccttggaatgggagtttctggtggtgaagaaggtgctcgtaatggcccatctatgatgcctggaggctcttatgaagcctacaagaatatcgaagacattgttctcaaggttgctgctcaggttagggatagtggtccctgtgtgacttatatcggtaagggcgggtctggaaactttgtcaaaatggtccacaatgggatcgagtacggtgatatgcagctgattgcagaagcttatgacgtcctcaagtctgttggtaaattatcgaatgaggagcttcacagtgtcttctctgactggaacaaaggtgagcttgagagtttcttggtagagatcacagcagatattttcgggatcaaggacgataagggagatgggcatttggttgacaaggtcttggacaaaaccggcatgaaaggcacaggaaagtggaccgtgcagcaagctgctgagctatctgttcctgctcccaccattgaatcctctcttgatgcgaggttccttagcgggcttaaagatgaacgtgtgcaagcagctaaagtcttcaaggcaggtgggtttggagatatcttgaccgatcagaaagttgacaagaaacagctagtcgatgacgtgaggaaggctctttacgcatccaaaatctgcagctacgcacaaggcatgaaccttatccgtgccaagagcatagaaaaggggtggggattgaagctaggtgagttagctagaatctggaaaggaggctgcatcatcagagcaatcttcctagacaggatcaagcaagcttatgacaggaacgcagagctagctaacctcttggtggatccagagtttgcgaaagagataatcgagagacagtccgcgtggagaagagtcgtctgcttagctatcaactcgggtatcagcacaccgggtatgtctgcgagtctagcctactttgattcttacaggagagagagattgccggcaaatctagtccaagcacagagagactactttggtgctcatacatatgaaaggactgatgtggaaggatctttccacaccgagtggttcaagattgcaagacaatctaagatctgagatctctcatcctcttgtattcttcttctccttcaataataagttccacacagtatgtttctttcctcaatgtgtgagataccttggcttatttatgattgtagaactgagtttctcatctttgtgtttctttttcttaaaaagattaaaactgaagtctttggttataattttttacttttggtttca

SEQ ID NO: 296 - protein, 486 aa, Arabidopsis thaliana
MAVQPTRIGLAGLAVMGQNLALNIAEKGFPISVYNRTTSKVDETVERAKKEGNLPLYGFHDPESFVKSIQKPRVIIMLVKAGSPVDQTIKTLSAYLEKGDCIVDGGNEWYENTERREKAVAENGFLYLGMGVSGGEEGARNGPSMMPGGSYEAYKNIEDIVLKVAAQVRDSGPCVTYIGKGGSGNFVKMVHNGIEYGDMQLIAEAYDVLKSVGKLSNEELHSVFSDWNKGELESFLVEITADIFGIKDDKGDGHLVDKVLDKTGMKGTGKWTVQQAAELSVPAPTIESSLDARFLSGLKDERVQAAKVFKAGGFGDILTDQKVDKKQLVDDVRKALYASKICSYAQGMNLIRAKSIEKGWGLKLGELARIWKGGCIIRAIFLDRIKQAYDRNAELANLLVDPEFAKEIIERQSAWRRVVCLAINSGISTPGMSASLAYFDSYRRERLPANLVQAQRDYFGAHTYERTDVEGSFHTEWFKIARQSKI

SEQ ID NO: 297 - DNA, 1813 bp, Arabidopsis thaliana
accaccaacctccgtcaaaaccctaaaccactatctctctctctctcttcatatcgcaacaatggagtccgtcgctctatctcgcataggtctcgccggtctcgcagtcatgggacaaaacctcgccttaaacatcgccgataaaggattcccaatctccgtctacaatcgaaccacttccaaagtcgacgaaaccttagatcgtgcctccaacgaaggaaaactcccagtcgctggtcaatactcgcctcgcgatttcgttctctcgatccaacggcctagatccgttatcatccttgtcaaagccggtgctcccgttgaccaaaccatctctgctctctctgaatacatggagcctggtgattgtatcatcgacggtggaaatgagtggtatcagaacacagagcgacgaatcgttgaagctgagaagaaaggattgctttatttaggtatgggagtctccggtggtgaagaaggagctcgtaatggtccttctcttatgcctggtggatctttcactgcgtataacaatgttaaagatattcttgagaaagttgctgctcaagtcgaagatggtccttgtgttacatacattggagaaggtggatctgggaattttgtgaaaatggttcataatgggattgaatatggtgatatgcagctgatttcggaggcgtatgacgtgttgaagaacgttggtggattgagtaatgatgaattggctgagatcttcacggagtggaatcgaggtgagcttgagagtttcttggttgagattacttcggatatatttagggttaaggatgattatggtgatggagagttagtggataagattttggataagactggtatgaaaggtacagggaaatggacggttcagcaggcggctgagctttctgttgcggcgcctacgattgctgcgtcgttggattgtagatacttgagtggattgaaggatgagagggagaatgctgctaaagttttggaagaagctggattgaaggaggatatcggttctgcgtctcgtggtgttgataagaagaggttgattgatgatgtgaggcaagctttgtatgcttctaagatctgtagttatgctcaagggatgaatttgcttagggctaagagtttagagaaaggttgggacttgaatttgggtgaaatggctaggatttggaaaggtgggtgtattatcagggcggttttcttggacaggatcaagaaagcttaccagagaaacccgaatttggcgagcttagtggttgatcctgattttgctaaagagatggttcagaggcaagctgcatggaggagagtggtgggtcttgctatatctgctgggattagcacaccaggaatgtgcgcaagtttagcgtatttcgacacttacaggcgtgctagattacctgcgaatctggttcaggcgcagagagatctctttggagctcatacatatgagagaaccgatcgtcctggtgcataccacactgaatggactaagcttgcaaggaagagtcagtaaagcatggacacagtcccttgatttgagggctttatttcatcatagaacacgaaaacaaattgtttcagcttatttttgttgagttataataagaaatgcaatgccccttgactctctgtatctgtctgttgatgatatctggagagtttcctttattttctcttatgtatggcttggttcatttttcgaatttgaatttgatatctatgttgaaattttggaagctgaagtcttcataattcttctgtagtcttcttgctcgttaaattgacgaatttttttccggtc

SEQ ID NO: 298 - protein, 487 aa, Arabidopsis thaliana
MESVALSRIGLAGLAVMGQNLALNIADKGFPISVYNRTTSKVDETLDRASNEGKLPVAGQYSPRDFVLSIQRPRSVIILVKAGAPVDQTISALSEYMEPGDCIIDGGNEWYQNTERRIVEAEKKGLLYLGMGVSGGEEGARNGPSLMPGGSFTAYNNVKDILEKVAAQVEDGPCVTYIGEGGSGNFVKMVHNGIEYGDMQLISEAYDVLKNVGGLSNDELAEIFTEWNRGELESFLVEITSDIFRVKDDYGDGELVDKILDKTGMKGTGKWTVQQAAELSVAAPTIAASLDCRYLSGLKDERENAAKVLEEAGLKEDIGSASRGVDKKRLIDDVRQALYASKICSYAQGMNLLRAKSLEKGWDLNLGEMARIWKGGCIIRAVFLDRIKKAYQRNPNLASLVVDPDFAKEMVQRQAAWRRVVGLAISAGISTPGMCASLAYFDTYRRARLPANLVQAQRDLFGAHTYERTDRPGAYHTEWTKLARKSQ

SEQ ID NO: 299 - DNA, 1714 bp, Brachypodium distachyon
  misc_feature (1664)..(1664): n is a, c, g, or t
ccacgcgtccgaggtggtggtcgcaattcgcatcgcacacgcagcacaactactctctctcagggcctccttcttcgtcgtcgtccacgcacgcagatctaaacgcagcagccaaggtaggagatggctctcacgagaattggtcttgctggccttgcggtcatggggcagaaccttgcccttaacattgcagagaaagggttccctatctctgtctacaacaggacaacttccaaggtcgatgagactgttcagcgcgccaagatagaaggaaaccttcctctgtatggtttccatgaccctgcatcctttgtgaactccattcagaagccacgtgtcgtcatcatgcttgtcaaggccggtgcaccagttgaccagaccattgcaacactcgcggcacacttggagcagggtgactgtatcattgatggaggaaacgagtggtacgagaacactgaaaggagggagaaggcgatggaggagcgtggactcctctatctcgggatgggtgtttctggaggagaggagggtgcccgccatggcccgtccatgatgcctggaggctcattggaggcataccagtacattgaagatattcttctcaaggtgtctgctcaagtccctgacagtggcccgtgcgtcacatacattgggaagggtggatcaggaaactttgtcaagatggttcacaatggaatcgagtatggagacatgcaactgatcgctgaggcatatgatgttcttaagtcggttggtaagctcacaaacagtgagctgcagcaggttttctccgagtggaacaagggtgagctcctcagtttcttggtcgagatcactgctgacatatttggcatcaaggatgaccaaggtgaaggctacttggtcgacaaggtcctggacaagactgggatgaaaggaacagggaaatggacagtccagcaggctgctgagctctctgtggctgctcctaccattgaggcttccttggattccaggttcctcagcgggttgaaggatgagcgggttgcggcctccaaaatcttccaaggtgactactccactgatctacctgtcgacaaggcacagttgattgaggatgtgaggaaagccctctatgcctcaaagatctgcagttacgctcagggcatgaacatcatcaaggccaagagcacggagaaaggatggggcctcaaccttggtgagctagccaggatttggaagggtgggtgcatcatccgcgccagcttcctggaccgcatcaagaaggcttatgacaggaacgctgagcttgccaaccttctcatagaccctgagtttgcgcaggagatcatggacagacaagctgcgtggcggagggttgtctgcctggctatcaacaatggtgtcagcaccccaggcatgtccgcgagtctggcgtactttgactcctaccggagggacaggctgcccgcgaacctggtgcaggcacagagggactactttggggctcacacctacgagagggttgacatgccaggctctttccacaccgagtggttcaagattgcaaactcgaagatctgagctgctgctgctccactgagtgacggcacggcaacatataaggcaatgtgtcatattttcagtatctctggttgccagttatgaatccttttttcctgtangggagaaactgctgttaatttttatttgagtaatgagtcttgtatttaaa

SEQ ID NO: 300 - protein, 479 aa, Brachypodium distachyon
MALTRIGLAGLAVMGQNLALNIAEKGFPISVYNRTTSKVDETVQRAKIEGNLPLYGFHDPASFVNSIQKPRVVIMLVKAGAPVDQTIATLAAHLEQGDCIIDGGNEWYENTERREKAMEERGLLYLGMGVSGGEEGARHGPSMMPGGSLEAYQYIEDILLKVSAQVPDSGPCVTYIGKGGSGNFVKMVHNGIEYGDMQLIAEAYDVLKSVGKLTNSELQQVFSEWNKGELLSFLVEITADIFGIKDDQGEGYLVDKVLDKTGMKGTGKWTVQQAAELSVAAPTIEASLDSRFLSGLKDERVAASKIFQGDYSTDLPVDKAQLIEDVRKALYASKICSYAQGMNIIKAKSTEKGWGLNLGELARIWKGGCIIRASFLDRIKKAYDRNAELANLLIDPEFAQEIMDRQAAWRRVVCLAINNGVSTPGMSASLAYFDSYRRDRLPANLVQAQRDYFGAHTYERVDMPGSFHTEWFKIANSKI

SEQ ID NO: 301 - DNA, 1663 bp, Caenorhabditis elegans
agaaattaaaatggccgaagctgatattgccgtcatcggattggccgttatgggtcaaaatcttattctgaacatgaatgatcacggattcactgtttgcgccttcaacagaactgtcaaattggtcgacgattttcttgccaatgaagctaaaggaactaagattattggagctcattcaattgaggaaatgtgcaagaaattgaaaagaccacgtcgtgtcatgatgctcattaaagccggaactcctgtcgatatgatgatcgatgcaattgttccgcatcttgaggaaggtgatattatcattgatggaggaaattctgaatacactgattcaaacagacgctccgagcaactcgccgcaaaggggatcatgttcgtcggctgtggagtttccggaggagaagaaggagctcgttttggaccatctcttatgccaggaggtaatccaaaagcctggccacatctgaaagacatcttccaaaagatcgctgccaagtcaaacggagaaccatgctgtgattgggtaggaaacgctggatccggtcacttcgtgaaaatggttcataatggaattgaatatggagacatgcaactgatagctgaagcatatcatcttctgagcaaggccgtcgagctgaatcacgatcaaatggctgaagttcttgatgattggaataaaggagaattggaatctttccttattgaaatcaccgctaatattttgaaataccgtgacgagcaaggagagccaattgttccaaagattcgtgattctgctggacaaaagggaactggaaaatggacttgtttcgctgctcttgagtatggacttcctgttactcttatcggagaagccgttttcgccagatgtctatctgctctgaaggatgaacgtgttcgtgcttcgaaacaacttcctcgtccacaagtctcaccagataccgtcgttcaggacaaaagagtcttcatcaagcaaatcagcaaggctctttacgcctcaaaaatcgtcagttatgctcaaggatttatgcttcttgccgaagcatctaaacaattcaactggaatttgaactttggagctattgctttgatgtggagaggaggatgcattattcgttcaagattcctcggagacattgaacacgctttccaaaagaacaagcaactttccaatcttcttctcgatgatttcttcaccaaggccatcaccgaagcgcaggattcatggcgtgttgttgtgtgtgcagctgttcgtctcggaattccagttccagcattctcatcggccctcgctttctatgatggatacaccagtgaggtagttccggctaacttgcttcaagcccaaagagactatttcggagcccacacctacgagcttctcgccaagccaggtacatgggtacacaccaactggactggaactggtggacgtgtcacctcaaatgcttacaatgcataagcatagaaaaatatatacgttatattaacgtgattttatcataacttactactcgatattcaatcccccgttctaatttttctgtgattgattagtgtttactcgatttttttagttcccttctactactccactcttcctatttttcttcagtatttgattgccattcgtgtgaaataataaatgtgttctatggct

SEQ ID NO: 302 - protein, 484 aa, Caenorhabditis elegans
MAEADIAVIGLAVMGQNLILNMNDHGFTVCAFNRTVKLVDDFLANEAKGTKIIGAHSIEEMCKKLKRPRRVMMLIKAGTPVDMMIDAIVPHLEEGDIIIDGGNSEYTDSNRRSEQLAAKGIMFVGCGVSGGEEGARFGPSLMPGGNPKAWPHLKDIFQKIAAKSNGEPCCDWVGNAGSGHFVKMVHNGIEYGDMQLIAEAYHLLSKAVELNHDQMAEVLDDWNKGELESFLIEITANILKYRDEQGEPIVPKIRDSAGQKGTGKWTCFAALEYGLPVTLIGEAVFARCLSALKDERVRASKQLPRPQVSPDTVVQDKRVFIKQISKALYASKIVSYAQGFMLLAEASKQFNWNLNFGAIALMWRGGCIIRSRFLGDIEHAFQKNKQLSNLLLDDFFTKAITEAQDSWRVVVCAAVRLGIPVPAFSSALAFYDGYTSEVVPANLLQAQRDYFGAHTYELLAKPGTWVHTNWTGTGGRVTSNAYNA

SEQ ID NO: 303 - DNA, 2454 bp, Chlamydomonas reinhardtii
gcgtcttcatcactcttccaaccgcaccgttattcgaaggaggaaaggggaaaccccacttgttgattgaaaatgcaggcgcttcagcgtagcgccaagactctgccgaccaccagccagcgtgttcgtgagattgcagctgtcacttcggctcctcgtgctgtggctggccctctgtccgcgcgcacgactgcacctctcgtgcagccggtctcggcgccccttgcctccggccgtcgtgtggaggctcgcgcagcgtctactgcttccgctcccaagtcaagcaagggaaacgcaccgatggctgtcgctgaaatcggtctggttggcctggcggtcatgggccagaacttggccctgaacatcgcggagaagggctttcccatttcggtctacaaccgtagctatgacaagactgaggccgcggtgaagcgcgctcagaaggagggcctgggcgagaagctgcacggctacgagcaagtcaaggactttgtgcagagcctgcagaggccccggcgcgtcatcatcctggtgaaggccggcgcgcccgtggaccagaccattgaccaactgtgcgagttcatggagcctggtgacatcatcattgacggcggcaacgagtggtacgagaacacggagaagcgcatggccaaggttgccgccaagggcatcctgtacatgggcatgggcgtgtccggcggcgaggagggcgcccgcaggggtccctccatgatgcccggcggcagccctgaggcgtacagccacatcaagagtgtggtggagaaggtggcggcacaggtggacgacggcccctgcgtgatgtacattggtggcggcggcgcgggcaacttcgtcaagatggtgcacaacggcatcgagtacggcgacatgcagctcatcagcgaggcctacgacgtgctgaagacgctgggcggcctcaacaacgaggagctggcggcggtgttcaaggagtggaatgacgccgagctcaagtcattcctggtggagatcacggccatcattgtgaacaagaaggacgaccaggcgcccggatatctggtggaccagattgtggaccagaccggctccaagggcacaggcaagtggacggtgcagcaggcggctgagctggcggtggcggcgcccaccatggcctcggcactggacgcgcgctacatgagtgcgctcaagtcggagcgcgtggccgcctccaagtcgttcacaagctgtgtcacgcccggccctgttgcgggtgtggacaaggcgcagctgatcaacgacgtgcgcgcggcgctgtacgccagcaagatctgctcgtacgcgcagggcatgaacattatcaaggccaagagcgtggagatgaagtggaacgtcgacctgggcggcctggcgcgcatctggaagggtggctgcatcatccgcgcgcagttcctggaccgcatccgcgtcgcctacgagcgcaaccccgagctgccctcgctgctggtggaccccgacttcgccaaggagctcaccgctgccgaggcgtcctggcgccgcgtggccgcgctgtccatcacgcacggcgtgcccatcccctccatgacctcctccctgggctactttgacacctaccgccgcgagcgcctgcccgccaacctggtgcaggcgcagcgcgacttcttcggctcgcacacctaccagcgcttcgacaaggagggctggtaccacaccgtgtgggacgagaccttcggctccgccgactccatcaccaccagcggctacgtggtgtaaggcgaggcagcggggtggtgttgcgaagggcagagccactgctggtggcggcgtattgtcgtagcagacgtggcggtggtggttactggtcaaggcttacgcatctggacctgtcgcagggtcttgtgttgttatgcaaggtgaagaagagttgcgctggcgctgtgccgcttgtaccgtatgtgtttggtgctgttggaacggggccggcgtgattgcgcttgagcatttcaggcggccgccggctccaggagagcagtgtgatgtgcgtgctcgcgagggtcgtcggactgagaagggctatgggcggcatgcgtcgtgcccgatgccccagggtgtcggggcgcatgcaactggctgtagcgcttcaagccaggctggtcgacccctcacgtggctctcgagtggtttcggtagttcaactaccccgatgatgctattatcagttatgttccagggctcaattgggcgcctggtggtaccgtaccggtatgcatacattgtttctgggcagcggagaagtagtgcagttacggaggcaagtatttcttaggtcctaggaataactgcggggctgacccctatcgctcagtcccctgcgtgtttgtcccagcgcgtaatgcccaatgctcgaagatgagattgccacgaatatggctgtgtaaagctttgggactgcca

SEQ ID NO: 304 - protein, 566 aa, Chlamydomonas reinhardtii
MQALQRSAKTLPTTSQRVREIAAVTSAPRAVAGPLSARTTAPLVQPVSAPLASGRRVEARAASTASAPKSSKGNAPMAVAEIGLVGLAVMGQNLALNIAEKGFPISVYNRSYDKTEAAVKRAQKEGLGEKLHGYEQVKDFVQSLQRPRRVIILVKAGAPVDQTIDQLCEFMEPGDIIIDGGNEWYENTEKRMAKVAAKGILYMGMGVSGGEEGARRGPSMMPGGSPEAYSHIKSVVEKVAAQVDDGPCVMYIGGGGAGNFVKMVHNGIEYGDMQLISEAYDVLKTLGGLNNEELAAVFKEWNDAELKSFLVEITAIIVNKKDDQAPGYLVDQIVDQTGSKGTGKWTVQQAAELAVAAPTMASALDARYMSALKSERVAASKSFTSCVTPGPVAGVDKAQLINDVRAALYASKICSYAQGMNIIKAKSVEMKWNVDLGGLARIWKGGCIIRAQFLDRIRVAYERNPELPSLLVDPDFAKELTAAEASWRRVAALSITHGVPIPSMTSSLGYFDTYRRERLPANLVQAQRDFFGSHTYQRFDKEGWYHTVWDETFGSADSITTSGYVV

SEQ ID NO: 305 - DNA, 1843 bp, Citrus sinensis
cagtttcaatggaagcctctgctctctcacgcatcggtcttgctggcctagccgtcatgggccagaacctggccctaaacgtcgctgaaaaaggcttcccaatctccgtctacaaccgcactacttccaaagtcgacgaaaccctagatcgggcccaccgcgagggtcaactccctttgaccggccactacactcccagggacttcgtcctctccatccaacgccccagatccgtcatcatcttagtcaaagccggctcccccgttgaccagaccatcgccgccctctcggagcacatgtcccccggcgactgcatcatcgacggcggcaacgagtggtacctcaacaccgagcgccgtatccatgaagccagccagaagggtttgctttatctcggcatgggggtctccggcggcgaggaaggcgcgcgtcatggtccctctttgatgcccggtggctccttcgaggcttataataatattcgagatattttgcaaaaagttgccgcccaagttgatgatggcccttgtgttacttacattggtgaaggcgggtctggtaatttcgttaagatggttcataacggaattgaatacggagacatgcagttgatttccgaagcttacgatgttttgaagcacgtgggtggactcagcaatgccgagttagcggagatatttgatgagtggaataagggcgagttggagagtttcttggttgagatcactgctgatattttcaaggtgaaggatgaatatggtgagggtgagcttgttgataagattttggataagaccggaatgaaagggaccggcaaatggaccgttcagcaagctgctgagctctcagtcgctgccccaaccattgctgcgtcgttggattgtaggtacttgagcggcttgaaagaggaaagagagaaagccgccaaggtcttgaaagaggcgggattgaaagatgaggttcaaaatgtgggagtacatgttgacaagaagagattgattgatgatgtgaggcaagcgctgtatgcttccaagatttgtagttatgcgcaagggatgaatctgttgaggagtaagagtaatgagaaaggatggaatttgaattttggcgaattggcgaggatttggaaaggtgggtgtattattagagccgtttttttggataggattaagaaggcttatcagaggaatccaaatttagctagtttggtcgtggacccggagtttgcgagggagatggtgcagaggcaggctgcgtggaggagagttgtggggttggctatttcagctgggattagcactcctgggatgtgtgctagtctttcttattttgatacttacaggagggcaaggctgccagcgaatcttgttcaggctcagagagacttgtttggggcgcatacttatgagaggattgatcgccctgggtctttccacactgaatggacaaaacatgcccgccagactggtgccggtgttggtgcgttcaattgagctgctaccttttgttgcttgtttgtttgattgattgtttcaatcgggtattgatgatgttcaatttgaattagggttgtatctttcattgggaatttcatgcctagccattaaggcattgcaattatcaattagtctcacagtttagctgttaataagaaatggatgcctttctataggtacaaggttttctctcatgtgcaacactaaataatgcaatttcttttgctttttgttatgttattctttttcgttgtgtctcaaatgcaaatgcaaacatgtgcgcataaacttgctcatccagatcggaatgttcaataaaagttttctaacttcagctttgtgcgaag

SEQ ID NO: 306 - protein, 494 aa, Citrus sinensis
MEASALSRIGLAGLAVMGQNLALNVAEKGFPISVYNRTTSKVDETLDRAHREGQLPLTGHYTPRDFVLSIQRPRSVIILVKAGSPVDQTIAALSEHMSPGDCIIDGGNEWYLNTERRIHEASQKGLLYLGMGVSGGEEGARHGPSLMPGGSFEAYNNIRDILQKVAAQVDDGPCVTYIGEGGSGNFVKMVHNGIEYGDMQLISEAYDVLKHVGGLSNAELAEIFDEWNKGELESFLVEITADIFKVKDEYGEGELVDKILDKTGMKGTGKWTVQQAAELSVAAPTIAASLDCRYLSGLKEEREKAAKVLKEAGLKDEVQNVGVHVDKKRLIDDVRQALYASKICSYAQGMNLLRSKSNEKGWNLNFGELARIWKGGCIIRAVFLDRIKKAYQRNPNLASLVVDPEFAREMVQRQAAWRRVVGLAISAGISTPGMCASLSYFDTYRRARLPANLVQAQRDLFGAHTYERIDRPGSFHTEWTKHARQTGAGVGAFN

SEQ ID NO: 307 - DNA, 1895 bp, Drosophila melanogaster
agtagcagtactcattagagtccactcacaaaattagcaccaaccggcagtaattggtcaaggatcggcgatagcttcaaactccgaagttcaaagtcaaactgccgccctgcgaaagcttcgcgagtggagcttttctgcacttatcgatagctaacattgtggcgcgactatcgatcgacgagctgccgcttaacagtgccatatatagattgtaacattagaagctcaaatcattgttggagcacaaaccacaaagaacacacgaaacatgagcggacaagcggatattgccctcatcggcctggccgtcatgggccaaaacctgatactcaacatggacgagaagggattcgtggtgtgcgcctacaaccgcacggtggccaaggtcaaggagttcctcgccaatgaggctaaggacaccaaagtgattggagccgactcgctcgaggacatggtctccaagctgaagagcccccggaaggtcatgctgctggtcaaggctggaagtgcagtcgacgacttcatccagcagctggtgccgctgctttccgccggcgatgtgatcatcgatggtggcaactcggagtatcaggacacatctcgccgctgcgacgagttagccaaacttggcctgctcttcgtcggatccggcgtgagcggtggcgaggagggcgcccgccacggaccctcgctgatgcccggcggacacgaggccgcgtggccccttatccaacccatcttccaggcgatctgcgccaaggccgacggtgaaccctgctgcgagtgggtgggcgatggaggcgccggtcacttcgtcaagatggtgcacaacggcatcgaatacggtgacatgcagctgatctgcgaggcgtaccacatcatgcagagcctgggactgtcggctgaccagatggcagacgagttcggcaagtggaactcggccgaactggactccttcctcattgaaatcacgcgtgatattcttaagtacaaggacggcaaaggttatctgctggagcggattcgcgataccgccggccagaagggcacgggcaagtggacggcaatcgctgctctgcagtatggagtgcctgtgacgctaattggcgaggcggtcttctcgcgatgcctgtctgccctgaaggacgagcgcgtccaggccagcagcgtgctgaagggaccctcgaccaaggcgcaagtggccaacctcaccaagttcctcgacgacatcaagcacgctctctactgcgccaagatcgtgtcctacgcccagggattcatgctcatgcgagaggcggccagggagaacaagtggagacttaattacggcggcattgcgctgatgtggcgcggcggctgcatcatccgcagcgtctttctgggcaacattaaggacgcgtatacgtcgcagccggagctgtctaatctgctgctggacgacttcttcaagaaggccatcgagcgcggccaggactcgtggcgcgaggtggtggccaatgccttccgctggggcattcccgtgccggccctgtctaccgccctaagcttctacgacggctaccgcacggccaagctgccagccaacttgctgcaggcccagagggattacttcggcgcccacacctatgagctgctgggccaggagggtcagttccaccacacgaactggacaggcaccggcggcaatgtgtccgccagcacctaccaggcgtaggttccacctgctccactttcccgttcacacattccatgtcattggcgccggtgtcttagatgtttcttttttttctggagtactttagtacttatttataccattaatatatatgtatgtatatagaatttcataattgttgttaaacataacattaaattggtgtttttttgctagc

SEQ ID NO: 308 - protein, 481 aa, Drosophila melanogaster
MSGQADIALIGLAVMGQNLILNMDEKGFVVCAYNRTVAKVKEFLANEAKDTKVIGADSLEDMVSKLKSPRKVMLLVKAGSAVDDFIQQLVPLLSAGDVIIDGGNSEYQDTSRRCDELAKLGLLFVGSGVSGGEEGARHGPSLMPGGHEAAWPLIQPIFQAICAKADGEPCCEWVGDGGAGHFVKMVHNGIEYGDMQLICEAYHIMQSLGLSADQMADEFGKWNSAELDSFLIEITRDILKYKDGKGYLLERIRDTAGQKGTGKWTAIAALQYGVPVTLIGEAVFSRCLSALKDERVQASSVLKGPSTKAQVANLTKFLDDIKHALYCAKIVSYAQGFMLMREAARENKWRLNYGGIALMWRGGCIIRSVFLGNIKDAYTSQPELSNLLLDDFFKKAIERGQDSWREVVANAFRWGIPVPALSTALSFYDGYRTAKLPANLLQAQRDYFGAHTYELLGQEGQFHHTNWTGTGGNVSASTYQA

SEQ ID NO: 309 - DNA, 1878 bp, Danio rerio
ttcagcagagaccgaataacagcagtcaaaaccctcatcgaaactctcatttttgaacggaaccaaacttcaacaatggctcaagcagatattgctctcattggtctggctgtgatgggtcagaatctgatcctgaacatgaatgaccatggatttgtggtctgtgcattcaacagaaccgtctccaaagtccatgacttcttaaacaatgaagccaaaggcactaaggtgatcggggccgaatcgcttgaagacatggtgtcaaaactcaaaaaacctcgccgcatcatcctgctggtcaaggcaggacaggctgttgatgacttcatcgataaactggttcctcttcttgagcctggagacatcatcattgatggtggaaattcagagtacagagatacaacgagacgttgtaagagcctgaaggagaagaatcttctgtttgtgggtagtggagtaagtggaggagaagatggggcacgttacggaccctcgctgatgcccggaggacataaagatgcctggccacacttaaaagacatttttcagagcattgctgccaaagtgggcaccggagagccgtgctgcgactgggttggagatgaaggagcgggtcattttgttaaaatggtccacaacggtattgaatacggggacatgcagctgatctgtgaggcctatcatctgatgaaggacgtgctttgtatgaaccatgatgaaatggctcaggtcttcgaacagtggaataagacagagctggactccttcctcatcgagatcacagccaacatcctaaaattcaaggacgcagacggcactaacctgctgcccaaaattagagacagcgccgggcagaagggcacagggaaatggacggctatctctgctctggaatacggcacacctgtcacactgatcggggaagctgtctttgccagatgcctctcgtctctgaaggatgaaagagttcaggccagtaagagcctcagcggccctcagggtgtcaagttcactggaaacaaagaacagttccttgaagacattagaaaggccttgtatgcctctaagatcatttcgtatgctcaaggcttcatgctgctgcgtcaggctgcgctggagttcggctggtctctgaattatggtgctattgctctgatgtggagaggaggctgcatcatccgcagtgttttcttgggaaagatcaaggaagcgtttgaccggaacccagagctgcagagtttgttgctggacagcttcttcagtaaggctgtacaggattgtcaggactcgtggcgtagggttgtgagtacaggtgtgcagcagggaatccccatgcccagtttcaccaccgcactgtccttctatgacgggtacagacacgagatgctcccagcaaacctgctgcaggcacagagagactactttggtgcgcacacgtatgagctgctatcaaaccctgggactttcatccacactaactggacaggacacggtgggaaagtgtcatcttcatcctataatgcctaaaatcaagaagccaccattggtaaaacagcagacaacatcccctcttgatgaaggaccagagcagctgatcacattcctgcagaagagctggagttcttactgaatgagtgttcaaacacacatttctatttatactagatcatagtatacacactatttgtacactttcgttcttgtagttttaaggtgcactgttgcaaacacactatcttcgagtgtgtgagatttttcctgctgtaaaccagtcatactttgcccccggagttcacagcgttaaccctggattacggtgactattgcactgcattaggctaaataaagatttcaatccctaaaaaaaaaaaaaaaaaa

SEQ ID NO: 310 - protein, 483 aa, Danio rerio
MAQADIALIGLAVMGQNLILNMNDHGFVVCAFNRTVSKVHDFLNNEAKGTKVIGAESLEDMVSKLKKPRRIILLVKAGQAVDDFIDKLVPLLEPGDIIIDGGNSEYRDTTRRCKSLKEKNLLFVGSGVSGGEDGARYGPSLMPGGHKDAWPHLKDIFQSIAAKVGTGEPCCDWVGDEGAGHFVKMVHNGIEYGDMQLICEAYHLMKDVLCMNHDEMAQVFEQWNKTELDSFLIEITANILKFKDADGTNLLPKIRDSAGQKGTGKWTAISALEYGTPVTLIGEAVFARCLSSLKDERVQASKSLSGPQGVKFTGNKEQFLEDIRKALYASKIISYAQGFMLLRQAALEFGWSLNYGAIALMWRGGCIIRSVFLGKIKEAFDRNPELQSLLLDSFFSKAVQDCQDSWRRVVSTGVQQGIPMPSFTTALSFYDGYRHEMLPANLLQAQRDYFGAHTYELLSNPGTFIHTNWTGHGGKVSSSSYNA

SEQ ID NO: 311 - DNA, 1407 bp, Escherichia coli
atgtccaagcaacagatcggcgtcatcggtatggctgtgatggggcgcaacttggctctaaacatcgagagccgtggttataccgtatccgtctataatcgctcgcgtgaaaaaactgaagaggttgttgccgaaaacccaggtaagaaactggtcccttattacacggttaaagagttcgtcgagtctcttgaaactccacgccgtatcctgttaatggtcaaagcgggtgctggcactgatgctgcgattaattccctgaagccctatctagataaaggcgacatcatcattgatggcggtaataccttctttcaggacacaattcgtcgtaaccgtgaactttccgcggaaggctttaactttatcggggccggggtttcaggtggtgaagagggcgcgctgaaaggcccatctatcatgcctggtggccagaaagatgcgtatgaaatggttgtgccaatcctgaccaagattgccgcgatagctgaagatggtgaaccgtgcgtgacgtatattggtgcggatggtgcaggtcattacgtgaagatggtgcacaacggtatcgaatatggcgatatgcaattgatagctgaagcctattctctgctgaaaggtgccctaaatctgtctaatgaagagttagcctctatctttaatgaatggaatgaaggcgagctgagcagctatctgattgacatcactaaggatatcttcaacaaaaaagatgaagagggtaaatacttggttgatgtgattttggacgaagctgcgaacaaaggtacaggcaaatggaccagccagagctctcttgatctaggcgaaccgctgtcgttgatcaccgaatccgtatttgcccgctacatctcctctctgaaagaccagcgtgttgcggcctctaaagtgctgtctggcccgcaggctaaactggctagtgataaagctgagtttgttgagaaagtacgccgtgccttgtacctaggcaaaattgtctcttatgcccaaggcttttctcaacttcgtgccgcatcagagcaatacaactgggatttgaactacggtgaaatcgcgaaaattttccgcgcaggctgcattattcgtgcacagttcctccagaaaatcaccgacgcttatgctgaaaacaaagatattgcaaacctgctgcttgctccgtatttcaaacatatcgctgatgaatatcaacaagccctccgtgatgtagtgtcttatgctgtgcagaacggtattccggtaccgactttctccgccgctgtagcttactacgacagctaccgttctgcggttctgccggctaacttgatccaagcacagcgtgattatttcggtgcgcacacgtataaacgcattgataaagaaggtgtttttcatacagaatggctagaataa

SEQ ID NO: 312 - protein, 468 aa, Escherichia coli
MSKQQIGVIGMAVMGRNLALNIESRGYTVSVYNRSREKTEEVVAENPGKKLVPYYTVKEFVESLETPRRILLMVKAGAGTDAAINSLKPYLDKGDIIIDGGNTFFQDTIRRNRELSAEGFNFIGAGVSGGEEGALKGPSIMPGGQKDAYEMVVPILTKIAAIAEDGEPCVTYIGADGAGHYVKMVHNGIEYGDMQLIAEAYSLLKGALNLSNEELASIFNEWNEGELSSYLIDITKDIFNKKDEEGKYLVDVILDEAANKGTGKWTSQSSLDLGEPLSLITESVFARYISSLKDQRVAASKVLSGPQAKLASDKAEFVEKVRRALYLGKIVSYAQGFSQLRAASEQYNWDLNYGEIAKIFRAGCIIRAQFLQKITDAYAENKDIANLLLAPYFKHIADEYQQALRDVVSYAVQNGIPVPTFSAAVAYYDSYRSAVLPANLIQAQRDYFGAHTYKRIDKEGVFHTEWLE

SEQ ID NO: 313 - DNA, 1805 bp, Euglena gracilis
gcacgaggattttttttcgcctttcctctttgtgacgatgtcgtgcgacgttggtctgtatggcctggcggtgatggggcagaacttcgcccttaacatggccgagcacggctttaccgttgccgtctgcaaccgctcaccgggcaaggtggacgacacggtggagcgggccaagggggagggcaacctgcccctcctcggcttcaaggacccgaaggacttcgtccaggcgctgaagcggccccgccgcatcgtcatcctggtgcaggccggcaagccggtggacgacaccatcgcgcacctcagcgggttcctggaggccggcgacctcattgtggacggcggcaacgagtggttccccaacagccagcggcgcgcggagctgctacgcccaaagggcatcctgttcatggggatgggcatctccggcggggaggagggcgcccgcaaggggccgtcgctgatgcccggcggggagcccggggcctacgagctgatggagcccatcatcacgaagtgcgccgcccaggtggacgacggcccgtgcaccttcaacattgggccggtgggcagcgggaactacgtgaagatggtgcacaatggtattgagtacggcgatatgcagatgattgcggagacctatgacctgctgaagcagcttgggggcttgacgaatgccgagctggcgaccaccttcacctcttggaacgagaccgagctcgccagctttttgatcgagatcacggggatcatcttcacgaaggcggacgaccagggggccccgggggagctggtggactacatcctggacaagacagggatgaagggcaccggccgctggaccatccaggaggctgcggagcgcaactccccggcctgcgtcatggccgccgccctcgacgcccgctacatttccgcccgcaaggacgagcgcgttgccgcggaggccatcctgaagggccccacggaccccacgccggcggtggacaaggcggcgttcgtggcggacgtgcgggcggcgctgttctgctccaaggtggtgagctacgcgcaggggatgaacctcatccgcagcgccgggcaggagctcggctggcccatcgacctcgcggagtgcgcgcggatctggaagggcggctgcatcatccgtgccgcattcctggacgacatcaagaaggcgttccagcagaacccagcactgcccaacctgctggtggacccctacttctccagcatgctgaacagccgcaccgccgcgtggcgccgggtggttcaactggccgtggtcagtggtatcgctgctccagccatatcggctgctttggcatatttcgactcctatcgccggggctccctccccgccaacctgacgcaggcccagcgggacttcttcggaggccactcctaccagcgtacggatagggatggcgtcttccattgcgagtggacgagtgcccacaaggcaattggaaacattgcggagagaactcgtggcaacctgtgaccacactggtcctgagcctcgaaacccagcgggttccctcactgttctccgggattttgacacgcaggtggcagagatgcgcgggcccttcgtcgtggggcaatgcgtcggccagtgtggtggcccaccgccctccccgttgcctattctcgctctgtggtccatcgccgtcctcccgtcatgtcgtttctttgcccaaaaaaaaccttcgaagcgctgccgtcccaggtgtccgtctttcgacgctccttgtgaaagcacgtgcagcaatgtttgcgttttcaaaaaaaaaaaaaaaaaa

SEQ ID NO: 314 - protein, 488 aa, Euglena gracilis
MSCDVGLYGLAVMGQNFALNMAEHGFTVAVCNRSPGKVDDTVERAKGEGNLPLLGFKDPKDFVQALKRPRRIVILVQAGKPVDDTIAHLSGFLEAGDLIVDGGNEWFPNSQRRAELLRPKGILFMGMGISGGEEGARKGPSLMPGGEPGAYELMEPIITKCAAQVDDGPCTFNIGPVGSGNYVKMVHNGIEYGDMQMIAETYDLLKQLGGLTNAELATTFTSWNETELASFLIEITGIIFTKADDQGAPGELVDYILDKTGMKGTGRWTIQEAAERNSPACVMAAALDARYISARKDERVAAEAILKGPTDPTPAVDKAAFVADVRAALFCSKVVSYAQGMNLIRSAGQELGWPIDLAECARIWKGGCIIRAAFLDDIKKAFQQNPALPNLLVDPYFSSMLNSRTAAWRRVVQLAVVSGIAAPAISAALAYFDSYRRGSLPANLTQAQRDFFGGHSYQRTDRDGVFHCEWTSAHKAIGNIAERTRGNL

SEQ ID NO: 315 - DNA, 1906 bp, Glycine max
tgattccagaccttaatttttctctcattcgcttcaaatttcaggaaatcaattatggctcaaccctcaacaagaataggccttgctggactggctgttatgggccaaaatctagcactcaatattgctgagaaaggctttcccatttctgtttataaccgaaccacttccaaggttgatgagactgtagaacgagcaaaacaagaaggaaatcttccagtttatggctaccatgaccccgaagcttttgttcattccattcaaaagcctagggtgataataatgcttgttaaggctggggcacctgttgaccagaccattaagaccctatctgcatacatggaaaaaggtgactgcataattgatggtggtaacgaatggtacgagaacaccgaaagaagagagaaagaggtggctgaattgggtctgctctaccttgggatgggagtttctggtggtgaggaaggtgctcgtaatggtccctctttgatgcctggtggttcgtttgaggctttcaaatacatagaagatattcttctcaaggtggcagctcaagtacctgacagtggtccttgcgtgacttatattggtaaaggtggttctggtaattttgtgaagatgatccacaatggcattgagtatggtgacatgcagctgattgcagaggcctatgatgtgctgaaatcagttggaaagttgtcaaatgaggaactacaaagtgtcttctcagaatggaacaagggagaacttctgagtttcctgattgaaatcactgcagatatatttggaattaaggatgataagggagatggatatcttgttgacaaggtcctagacaagactggcatgaagggcactggtaagtggactgttcagcaagctgctgaattatcaattgctgctcccactattgaagcatcattggatgcaaggttcctgagtgggttgaaggaggaaagagttgaagctgcaaaggtctttaaatcaggtggcattggtgatatcgtgactgatcaacctgtagacaagaaaaaattggttgatgatgttaggaaggctctttatgcagccaaaatctgtagttatgcacagggaatgaatttgatccgtgcaaagagtattgaaaagggttgggatttgaagttgggtgaactggcccggatttggaaagggggttgcattattagagcaatattcttagacagaatcaagcaggcatatgaaagaaaccctaatctggcaaaccttcttgtggatccagagtttgcaaaggaaataattgattaccaatctgcctggaggagagttgtttgccttgctatcaattctggtattagcactccaggtatgtctgctagtcttgcttattttgacacttacagaagggaaaggttgccagctaatttggtgcaagctcaacgagactactttggtgctcatacatatgaaagggttgacatagaggggtcttaccatactgagtggttcaagcttgccaaacagtcaagaaattagattactgtatttgagccaatcaggattttcctaataaatgtaatattttctgctcagactgtatgctgagttgagtttgcatatccacaatgtggtgaagttttattatattatttccaactgaattgcttggcagtttgttttccaacaactatgttgtatctttgctgatcatgcttggtgcttgatacaaaattcccagttcatggtgcctttttaattttcacatttttataagatttcctttagcaccatggatacatgttatgttacagcaggagttgaaatttttagttttatctttaacttgttgagtttaatgttgatctactgtcaagagtgaataagttcgatattgttggacaatattaagaatatcagtagatattgt

SEQ ID NO: 316 - protein, 486 aa, Glycine max
MAQPSTRIGLAGLAVMGQNLALNIAEKGFPISVYNRTTSKVDETVERAKQEGNLPVYGYHDPEAFVHSIQKPRVIIMLVKAGAPVDQTIKTLSAYMEKGDCIIDGGNEWYENTERREKEVAELGLLYLGMGVSGGEEGARNGPSLMPGGSFEAFKYIEDILLKVAAQVPDSGPCVTYIGKGGSGNFVKMIHNGIEYGDMQLIAEAYDVLKSVGKLSNEELQSVFSEWNKGELLSFLIEITADIFGIKDDKGDGYLVDKVLDKTGMKGTGKWTVQQAAELSIAAPTIEASLDARFLSGLKEERVEAAKVFKSGGIGDIVTDQPVDKKKLVDDVRKALYAAKICSYAQGMNLIRAKSIEKGWDLKLGELARIWKGGCIIRAIFLDRIKQAYERNPNLANLLVDPEFAKEIIDYQSAWRRVVCLAINSGISTPGMSASLAYFDTYRRERLPANLVQAQRDYFGAHTYERVDIEGSYHTEWFKLAKQSRN

SEQ ID NO: 317 - DNA, 1819 bp, Gossypium raimondii
cgaaagggagaaacatggctccacctaccttgatagggcttgctggtttggctgttatgggccaaaatcttgcacttaacattgctgagaaaggctttcccatttctgtttataacagaactacctctaaagtcgatgagactgttgaaagagctaaaaaggagggagatcttcctgtatatggtttccatgatcctgaatcttttgttcagtcaatccagaaacctagagtggtaatcatgcttgttaaggcaggggcccctgttgaccaaaccattaagactctctctgcatacttggagaaaggtgattgtatcatcgatggtggcaacgagtggtatgaaaacactgagagacgacagaaagagatgtcggcactgggtttgttataccttgggatgggagtttcaggtggagaagaaggtgcacgaaatggtccctctttaatgcctggagggtcctttgaagcttacaaatacattgaagacattcttcttaaagttgccgctcaagttccagatagtggcccatgtgtgacttacattggaaaaggtggatctggtaattttgtcaagatggttcacaatggaattgaatatggtgatatgcaactgattgcagaggcttatgacgtgctgaaatctgttgggaaattatctaatgaagaactacatagtgttttctcagaatggaacaagggggagcttttgagcttcttgattgaaatcactgctgatatatttggaattaaggatgacaaggcagatggttatttagttgataaggttttggacaaaactggcatgaagggtactggtaaatggactgtacagcaagctgctgatttgtccattgcagctccaacaattgcagcttctctggattcaaggttccttagtgggttgaaagaggaaagagttgaagctgctaaagtcttcaaatcaggaggatttggtgatgtcttgaccgaccaagttgtggacaaggcaagattaattgatgatgtaaggcaagcactttatgcatccaagatttgcagttatgctcagggcatgaatctcattcgtgcaaaaagcatcgagaagggttgggacttgaagttgggggaactggctaggatatggaagggaggctgcattatccgcgctattttcctggacagaatcaagaaggcttatgatagaaattctgaccttgcaaaccttcttgtcgacccagaatttgcaaaggaaatcattgacaggcaatctgcttggagaagagttgtttgtcttgctatcaactctggtattagcactccaggcatgtcagccagtcttgcctatttcgacacttataggagggaacgagtaccggctaatttggttcaagctcaacgagattattttggtgcccatacttatgaaagggttgacatggacggatctttccacactgaatggttcaagatcgccaaaaagctaaaagattaatattattctagcagtactcttcagaacactcccaataagtgtaataaaatctgctctggactctatgctacacagagctacaactatgattatctttttcaaaatttatctcaacttcatttctcaaattgagctgcgaatttataccctgttctaggattaatgtgcttttatgttttttccggatttgagtatttacccaatgtgggtcactgtggttaattactgtgtgaagtgtgaactgtaagagaaagtcaactttttttcctttttgcttgataatcttctgttccttttaattttcttgttttcttgtactgttagatatcaacatcttttcgacaggt

SEQ ID NO: 318 - protein, 485 aa, Gossypium raimondii
MAPPTLIGLAGLAVMGQNLALNIAEKGFPISVYNRTTSKVDETVERAKKEGDLPVYGFHDPESFVQSIQKPRVVIMLVKAGAPVDQTIKTLSAYLEKGDCIIDGGNEWYENTERRQKEMSALGLLYLGMGVSGGEEGARNGPSLMPGGSFEAYKYIEDILLKVAAQVPDSGPCVTYIGKGGSGNFVKMVHNGIEYGDMQLIAEAYDVLKSVGKLSNEELHSVFSEWNKGELLSFLIEITADIFGIKDDKADGYLVDKVLDKTGMKGTGKWTVQQAADLSIAAPTIAASLDSRFLSGLKEERVEAAKVFKSGGFGDVLTDQVVDKARLIDDVRQALYASKICSYAQGMNLIRAKSIEKGWDLKLGELARIWKGGCIIRAIFLDRIKKAYDRNSDLANLLVDPEFAKEIIDRQSAWRRVVCLAINSGISTPGMSASLAYFDTYRRERVPANLVQAQRDYFGAHTYERVDMDGSFHTEWFKIAKKLKD

SEQ ID NO: 319 - DNA, 1941 bp, Hordeum vulgare
gcacttgtccccttcctcccttccttccttccttgttcctcccttcgcgcaggcagatcccatccttcctccctcccttccttcgcgcaggcagatcccatccaaggcaggcaggcaggcaggcaggtacgggatggctctcaccagaattggtcttgccggcctcgccgtcatggggcagaaccttgccctcaacattgcagagaaaggcttccccatctctgtctacaacaggacgacatccaaggtcgacgagaccgtccagcgcgccaagctagaaggaaaccttcctctctacggtttccatgaccctgcatccttcgtcaactccattcagaagccacgtgtcgtcatcatgcttgtcaaggccggtgctccggttgaccagaccatcgccacgctcgcagcacacctggagcagggcgactgcatcgttgacggaggaaacgagtggtatgagaacacagaaaggagggagaaggcgatggaggagcgtggactcctctacctcggtatgggtgtttctggaggagaggagggtgcccgccatggcccgtccatgatgcctggaggctcgttggaggcgtaccagtacattgaagacattcttctcaaggtgtctgctcaggtccctgacagcggcccgtgcgtcacatacattgggaagggcggctctggaaactttgtgaagatggttcacaatggtattgagtacggtgacatgcagctgatcgctgaggcgtatgacgtcctcaagtcggttggtaagctcacaaacggtgagctgcagcaggttttcgccgagtggaacaagggtgagctcctcagtttcttggtcgagatcacagctgatatattcagcatcaaggatgaccagggtgaaggttacttggtcgacaaggtcctggacaagacagggatgaagggaaccgggaagtggacggtgcagcaggccgctgagctctccgtggctgctcctaccattgaggcgtccttggattccaggttcctcagcgggctgaaggacgagagggtggctgcttccaagatcttccagggtgactacagcagcggcgaaactgtcgacaaggcacagctgattgaggatgtgaggaaggccctgtacgcctccaagatctgcagctacgcccagggcatgaacatcatcaaggccaagagcacggagaaggggtggggcctcaacctcggcgagctggccaggatctggaagggcgggtgcatcatccgtgccagcttcctcgaccgcatcaagaaggcctacgacaggaacggtgagctcgccaacctcctcatcgaccccgagttcgcgcaggagatcatggacaggcaagccgcgtggaggagggtcgtctgcctcgccatcaacaacggcgtcagcacccccggcatgtccgcgagtctggcctacttcgactcctaccggagggacaggcttcctgccaacctcgtccaggcccagagggactacttcggggcgcacacctacgagagggtcgacatgcccggctccttccacaccgagtggtacaagatcgccaactcgaagatctaagctgctgctgccgctggtctaccgagagacggcccgtcaggtttcgtcttgttggtatcctttgccgctgccagtcatgagtccttttcctgcaggggagcaactgccgtttaatttttactattcgagtataatgagtcctgtatttattttctacaaggagatcacatattctctccagtccctccactacttccatgtgattgatcaaaccctggagggaagacagtaattgttgctcgtcgaatctcccccggcgattattctgaattagtttgaataaaatgtgttttcacctacccgtctttttttacccgtgtttgatttgatttgatgggcaatgatccttctttcccaagaccgctttt

SEQ ID NO: 320 - protein, 479 aa, Hordeum vulgare
MALTRIGLAGLAVMGQNLALNIAEKGFPISVYNRTTSKVDETVQRAKLEGNLPLYGFHDPASFVNSIQKPRVVIMLVKAGAPVDQTIATLAAHLEQGDCIVDGGNEWYENTERREKAMEERGLLYLGMGVSGGEEGARHGPSMMPGGSLEAYQYIEDILLKVSAQVPDSGPCVTYIGKGGSGNFVKMVHNGIEYGDMQLIAEAYDVLKSVGKLTNGELQQVFAEWNKGELLSFLVEITADIFSIKDDQGEGYLVDKVLDKTGMKGTGKWTVQQAAELSVAAPTIEASLDSRFLSGLKDERVAASKIFQGDYSSGETVDKAQLIEDVRKALYASKICSYAQGMNIIKAKSTEKGWGLNLGELARIWKGGCIIRASFLDRIKKAYDRNGELANLLIDPEFAQEIMDRQAAWRRVVCLAINNGVSTPGMSASLAYFDSYRRDRLPANLVQAQRDYFGAHTYERVDMPGSFHTEWYKIANSKI

SEQ ID NO: 321 - DNA, 1593 bp, Laminaria digitata
atgtccgcttccgcgctgtccgacgttggcctctatggcttggcggtcatgggacagaacttcgcgctcaacatggcgagccacggcttctccgtgtctgtgagcaaccggtcgcccgagaaggttgacgctaccgttgcgcgcgccaaggaggagggcaacctccccttgaggggcttcaaggaccccaagagcttcgtggactccctctcgaaacctcgcaagatcgtcctgctcgttcaggccggcgccgccgtagacgccaccatcgccacgctttccgagctcttggaggaaggagacatcctcgtcgacggtggcaacgagtggttccccaactcgcagcgccgcgcgaaggagctggagccgaagaagatcatgttcgtcggcatgggtgtctccggcggagaggaaggcgcgcgcaacggcccctcgcttatgcccggtgggcctagggaggcgtacgacgcgctttcgcccatcatttcgaagtgtgctgctcaggtcgacggaccgtgcacaacttacctgggcagcatcggctcaggaaactacgtgaagatggtccacaacggcatcgagtacggagacatgcagctcattgccgaggtgtacgacgtactcaagcacgtggctggcttgaccaacgacgagctttcggctacgttcacggactggaaccagggagagctccagagctttttgatcgagatcacggccgtgattttttcgaggaaggacgacctcacgtccagcggccacgtcgtagacaagatcctcgacaagacaggcatgaagggcactgggcgatggacggtccaggaagccgccgaacgcagcaccgccgcgcctaccatggccgccgcactcgatgcccgctacatgagcggccgcaagggcgagcgtgttgaagctgccaagactctcaagggacccagcacgatcccccaggtgcctaaggcgcagctgatcgaggacatgaaggccgccctttactgctccaagatctgctcatacgcacagggcatgaacctcatcaaggccgcatccgagcacttcgagtggggcgtggacctcggagagtgtgcccgtatctggaagggcggctgcatcatccgggctgcgttccttgacgacatcaagaacgcctatatcaagaacgccgacctcgacaaccttcttgtcgaccccttcatcacctctcagatcttggagcgccaggcggcctggaggcgtgtggtgaccctctgcgtggcaagcggcatcgctgcccctgccatgaccgcgtctctgtcctacttcgactcctaccgccgcgctcgcttgccagccaaccttgttcaggctcagcgcgacttcttcggagcgcacacgtacgagcgcgtggacaaggagggagtcttccactgcctctgggacgacacccacaaggaaatcgcgacatcgccggcgcatggcgggcgaactctaataggatcgctcccaaacttgttccgtcctttgtgtatggggtgtctaaattggagcagcacggtcgtgtctgtagcatactgcggtatgaagtattacatagggagcctgagttttacgtag

SEQ ID NO: 322 - protein, 530 aa, Laminaria digitata
MSASALSDVGLYGLAVMGQNFALNMASHGFSVSVSNRSPEKVDATVARAKEEGNLPLRGFKDPKSFVDSLSKPRKIVLLVQAGAAVDATIATLSELLEEGDILVDGGNEWFPNSQRRAKELEPKKIMFVGMGVSGGEEGARNGPSLMPGGPREAYDALSPIISKCAAQVDGPCTTYLGSIGSGNYVKMVHNGIEYGDMQLIAEVYDVLKHVAGLTNDELSATFTDWNQGELQSFLIEITAVIFSRKDDLTSSGHVVDKILDKTGMKGTGRWTVQEAAERSTAAPTMAAALDARYMSGRKGERVEAAKTLKGPSTIPQVPKAQLIEDMKAALYCSKICSYAQGMNLIKAASEHFEWGVDLGECARIWKGGCIIRAAFLDDIKNAYIKNADLDNLLVDPFITSQILERQAAWRRVVTLCVASGIAAPAMTASLSYFDSYRRARLPANLVQAQRDFFGAHTYERVDKEGVFHCLWDDTHKEIATSPAHGGRTLIGSLPNLFRPLCMGCLNWSSTVVSVAYCGMKYYIGSLSFT

SEQ ID NO: 323 - DNA, 1890 bp, Malus domestica
cccagatctttgatttcttgggttcgctcgatttcctcagattttcaatcccccttctctccttacagaagaacactttcagtttcaggcaaaaagatggctgcaacaccaaaacctacaagaataggccttgccggtttggctgtcatgggccaaaatttggctctcaacattgcagagaaaggcttccccatttcggtatacaatagaactacctccaaagttgatgagaccgttgagcgagctaaaaaggaaggaaaccttcccctttatggattccatgatcccgaatcttttgttaagtcaatccagaaaccccgtgtcgtgatcatgcttgtcaaggctggggcgcccgttgaccagaccataaagaccctctccgtctacctggagaaaggtgactgcatcattgatggtggtaatgagtggtatgagaatactgagaggagggagaaagccatggctgaactaggtcttctttaccttggaatgggagtttcaggtggtgaggagggcgctcgatacgggccttctatgatgcctggaggttcctttgaggcctataagtacattgaagacattcttcttaaggtgtcagctcaagttccggacagtggtccttgtgtgacttacattggcaaaggtgggtctggtaactttgtcaagatgattcataatgggattgaatacggcgatatgcagctgatagcggaggcttatgatgtactgaaatcagtaggaaagttgtcaaatgaggaactccaaaaagctttctcagagtggaacaaaggtgaacttctcagtttcctgattgaaatcactgctgatatatttggaatcaacgatgacaagggagatggatatttggtcgacaaggttttggacaagactggcatgaagggtactggtaaatggaccgtacagcaagctgctgaactatcagttgctgctccaacaattgaatcttcattggatgcaaggttcctcagtgggttaaaggacgagagggttaaagcagctaaagtgttcaaatcagccggctttgaggatagcttgaacaccccagaggtggataaggcaaagctgatcgatgatgtgaggcaagcactttatgcatcaaagatatgcagttatgcacaagggatgaatttgatccgtgcaaagagtattgagcagggatgggacttgaagttgggcgaattggccaggatctggaagggaggttgcatcattcgtgcggtgttcctagacagaattaagaaggcatatgacaggaatgctgatcttgcaaaccttcttgtggacccagagttctcgaaagagatcgttgagaggcagtctgcctggagaagggtggtatgccttgctatcaactcaggcatcagcacccctggtatgtcagctagtcttgcttatttcgactcctacagaagggaaagcctgcccgctaacttggtccaagctcagcgtgactacttcggtgctcacacatacgaaagaactgacatggaaggtgctttccatactgaatggttcaaaatcgcgaaacagtcaaagatttaagtccaatttctgtggcacattcaactcaagcagagaacactccatctgaataatttctgctgacgattttacgctgggcggagcttctgccaactctttttcagtgaaaaaatttatcccaaataagttttatcagtttattttttaagactttgaagggtgctttgttatgctcgtgcttttggcagatctgtccacgcccacaacccctttctaactttgaaagatgtaattctattcaattcaggggaactcaaaatttttatatttatctcaatttcagcagctctaattagatatttttgtgcatttttcttgcaaaaaaaa

SEQ ID NO: 324 - protein, 488 aa, Malus domestica
MAATPKPTRIGLAGLAVMGQNLALNIAEKGFPISVYNRTTSKVDETVERAKKEGNLPLYGFHDPESFVKSIQKPRVVIMLVKAGAPVDQTIKTLSVYLEKGDCIIDGGNEWYENTERREKAMAELGLLYLGMGVSGGEEGARYGPSMMPGGSFEAYKYIEDILLKVSAQVPDSGPCVTYIGKGGSGNFVKMIHNGIEYGDMQLIAEAYDVLKSVGKLSNEELQKAFSEWNKGELLSFLIEITADIFGINDDKGDGYLVDKVLDKTGMKGTGKWTVQQAAELSVAAPTIESSLDARFLSGLKDERVKAAKVFKSAGFEDSLNTPEVDKAKLIDDVRQALYASKICSYAQGMNLIRAKSIEQGWDLKLGELARIWKGGCIIRAVFLDRIKKAYDRNADLANLLVDPEFSKEIVERQSAWRRVVCLAINSGISTPGMSASLAYFDSYRRESLPANLVQAQRDYFGAHTYERTDMEGAFHTEWFKIAKQSKI

SEQ ID NO: 325 - DNA, 1601 bp, Medicago sativa
tacattatggctccaccacttacaagaataggccttgccggattggctgttatgggccagaatctcgcactcaatattgccgacaaaggattcccaatttctgtttataatagaacaacatcaaaggttgacgaaactgtggaacgagcaaaacaggagggaaatcttccactctatggcttccatgaccctgaagcctttgttaattccattgaaaaaccaagggtgattataatgcttgttaaggctggtgcacctgttgaacagaccaccaaaaccctatctgcgtaccttgaaaaaggtgattgtataattgatggtgataatgaatggtacgagaacactgagagacgagagaaagaggtagccgaattgggtattctctaccttggaatgggagtttcaggtggtgaggagggtgctcgacgtggtccttctatgatgcctggtggttcgtttgaagcttacaaatacatagaagatattcttctcaaggtggctgctcaagttcctgacagtggcccttgtgtgacatatatcggtaacggtggatctggtaattttgtgaagatgatccataatggaattgaatacggtgacatgcagctgattgctgaggcttacgatgtgttgaagtcagttggaaagttgacaaatgaggagctacaaagtgcatttactgaatggaacaagggagaacttttgagtttcctgattgaaatcactgcagatattttcggaattaaggatgataagggtgatggatatcttgttgacaaggttcttgacaaaactggcatgaagggtaccggtaagtggactgttcagcaagcagctgaattatcagttcctgctcccaccattgaagcttcattggatgctaggttccttagtgggttgatggatgaaagagttgaagctgcaaaggtctttaaatcaggtggttttggcgatatcttgaccgaccaacaagtagacaagaagcagttgattgatgatgttaggaaggctctttatgcagccaagatttgtagttacgcacaagggatgaatctgatccgtgcaaagagtgctgaaaagggttgggatttggcattgggtgaacttgcccgtatttggaaaggaggttgcatcattagagctatattcttggacagaatcaagcaagcgtacgacagaaaccctaatctcgcaaaccttcttgtggatccagagttcgcaaaggaaataattgaacgccaaaccgcatggaggagagttgtttccctttctgtcaattcaggtatcagcctcccaggtatgtctgctagtcttgcatattttgacagttatagaagggaaaggttaccggctaatttggtgcaagctcaacgagactacttcggtgctcatacatatgaaagggttgatattgaggggtcgtaccatactgaatggttcaagcttgccaagcagtcaaggatttagattactgtatttgaactcttcaagattcctaataaatgtaatgttttttactcaagactgtatgctgagttgagcttacatagctgcaatgcggtgaagtttatttataccattctgtactacttaattacttg

SEQ ID NO: 326 - protein, 486 aa, Medicago sativa
MAPPLTRIGLAGLAVMGQNLALNIADKGFPISVYNRTTSKVDETVERAKQEGNLPLYGFHDPEAFVNSIEKPRVIIMLVKAGAPVEQTTKTLSAYLEKGDCIIDGDNEWYENTERREKEVAELGILYLGMGVSGGEEGARRGPSMMPGGSFEAYKYIEDILLKVAAQVPDSGPCVTYIGNGGSGNFVKMIHNGIEYGDMQLIAEAYDVLKSVGKLTNEELQSAFTEWNKGELLSFLIEITADIFGIKDDKGDGYLVDKVLDKTGMKGTGKWTVQQAAELSVPAPTIEASLDARFLSGLMDERVEAAKVFKSGGFGDILTDQQVDKKQLIDDVRKALYAAKICSYAQGMNLIRAKSAEKGWDLALGELARIWKGGCIIRAIFLDRIKQAYDRNPNLANLLVDPEFAKEIIERQTAWRRVVSLSVNSGISLPGMSASLAYFDSYRRERLPANLVQAQRDYFGAHTYERVDIEGSYHTEWFKLAKQSRI

SEQ ID NO: 327 - DNA, 1896 bp, Medicago truncatula
tagataccaaaatggattcatttttctttgtctgaaaagattggtggttggtggtcttgatagccatcgtcgagtcgaccattgaatttcaagtttcatttcaactccaaatttaatattacaaattggaaatacattatggctcaaccacttacaagaataggccttgccggactggctgttatgggccaaaatctcgcactcaatattgccgacaaaggattcccaatttctgtttataacagaacaacatcaaaggttgacgaaactgtggaacgagcaaaacaggagggaaatcttccactctatggcttccatgaccctgaagcctttgttaattccattcaaaaaccaagggtgattataatgcttgttaaggctggtgcacctgttgaccagaccatcaaaaccctatctgcgtacctggaaaaaggggattgtataattgatggtggtaatgaatggtatgagaacacggagaggcgagagaaagaggtagccgaattgggtcttctctaccttggaatgggagtttcaggtggtgaggagggtgctcgacgcggtccttctatgatgcctggtggttcgtttgaagcttacaaatacatagaagatattcttctcaaggtggctgctcaagttcctgacagtggcccttgtgtgacatatatcggtaaaggtggatctggtaattttgtgaagatgatccataatggaattgaatatggtgacatgcagctgattgctgaggcttacgatgtgttgaagtcagttggaaagttgacaaacgaggagctacaaagtgcatttaccgaatggaacaagggagaacttttgagtttcctaattgaaatcactgcagatatattcggaattaaggatgataagggtgatggatatcttgttgacaaggttcttgacaaaactggtatgaagggtaccggtaagtggactgttcagcaagcagctgaattatcagttcctgctcccaccattgaagcttcattggatgctaggttccttagtgggttgaaggatgaaagagttgaggctgcaaaggtctttaaatcaggtggctttggcgatatcttgactgaccaacaagtagacaagaagcagttgattgatgatgttaggaaggctctttatgcagccaagatttgtagttacgcacaagggatgaatctgatccgtgcaaagagtgctgaaaagggttgggatttggaattgggtgaacttgcccgtatttggaaaggaggttgcatcattagagctatattcttggacagaatcaagcaggcgtacgacagaaaccctaatctcgctaaccttcttgtggatccagagttcgcaaaggaaataattgaacgccaaaccgcatggaggagagttgtttcccttgctgtcaattcaggtatcagcctcccgggtatgtctgctagtcttgcatattttgactcttatagaagggaaaggttgccagctaatttggtgcaagctcaacgagactacttcggtgctcatacatatgaaagggttgatatcgaggggtcgtaccatactgaatggttcaagcttgccaagcagtcgaggatttagattactgtgtttgaactcttcaagattcctaataaatgtaatgttttttactcaagactgtatactgagttgagcttacatagctgcaatgcggtgaagtttatttataccattctgtactacttaattacttggtttttggttttccaacaattgtgctgtatctttgctgatcttgctttgaatttgatataaaattgtccaacttcaccaaaaataataaaaaaataaataataataatatataaataaaaatataaataagttaaaaaagaataaagaaaaaactgaggggcc

SEQ ID NO: 328 - protein, 486 aa, Medicago truncatula
MAQPLTRIGLAGLAVMGQNLALNIADKGFPISVYNRTTSKVDETVERAKQEGNLPLYGFHDPEAFVNSIQKPRVIIMLVKAGAPVDQTIKTLSAYLEKGDCIIDGGNEWYENTERREKEVAELGLLYLGMGVSGGEEGARRGPSMMPGGSFEAYKYIEDILLKVAAQVPDSGPCVTYIGKGGSGNFVKMIHNGIEYGDMQLIAEAYDVLKSVGKLTNEELQSAFTEWNKGELLSFLIEITADIFGIKDDKGDGYLVDKVLDKTGMKGTGKWTVQQAAELSVPAPTIEASLDARFLSGLKDERVEAAKVFKSGGFGDILTDQQVDKKQLIDDVRKALYAAKICSYAQGMNLIRAKSAEKGWDLELGELARIWKGGCIIRAIFLDRIKQAYDRNPNLANLLVDPEFAKEIIERQTAWRRVVSLAVNSGISLPGMSASLAYFDSYRRERLPANLVQAQRDYFGAHTYERVDIEGSYHTEWFKLAKQSRI

SEQ ID NO: 329 - DNA, 1431 bp, Nostoc punctiforme
atgacactacaaagctttggtgtgattggattagccgttatgggtgagaacatcgctctaaacgtagagcgcaatggcttcccaattgcagtttacaaccgctcccgagaaaaaacggatgcgtttatggcgcagcgtgctacaggacggaacgtcaaagccgcctttactctagaagaattcgttgccttattggaacgtccccgcaaaattctagtaatggtgcaagctggtaagccagtggatgcggtgattgctcaactcaaacccttgttagaggaaggcgatatcattatcgacggtggcaactcttggtttgaagatacggaacgacgcactcaggaattagaacccgctgggcttcggtatcttggtatgggtgtcagtggtggtgaagaaggggcgctgaatggcccatctctgatgcctggaggtacaacaagctcttacgagtttctatcaccaattttcaacaaaattgctgcccaagtcgatgatggcccttgtgtaacctacattggccctggtggttctggccactatgtcaaaatggtacacaacggcattgagtatggcgatatgcagctaattgctgaagcctacgacttgctgaaaaatgtcgctggattaaaccccagtcagctacatgatgtgtttgctgaatggaataccaccgatgaactcgattcatttttgattgaaattacgaagaatatcttcccatatattgacccagaaacaaataaacccctggtggatttgattgttgatgcagcaggtcaaaagggaactggacgctggactgtacaaactgcattggaattgggagttgctattcctacaattacagcagcagttaatgcccggattatatcttcgattaaagatgagcgggttgcagcatctaaagtcctcactggccccagtggcaagtatgacgggcaaactaaagactttatcaataaagtacgtgatgctctctattgctcaaaaatctgttcttatgctcaagggatggcgttgctatccacagcttcaaaaacatataactggaatttggatctgggcgagatggcgcggatttggaaaggtggttgtattattcgcgctcgctttttgaataagattaagaaggcttttagcgaaaatccagctttgcctaacttgctgttagctcccgaatttaagcaaacaattcttgacagacaaactgcttggcgggaagtgattgcgacagctgcaacagttggaattccagtacccgcatttagcgcctccttggattattttgacagctatcgccgcgatcgcttgcctcaaaatctaactcaagcacaacgcgactactttggcgcacatacctacctgcgtcttgataagcccggaagtttccatactgaatgggtacctattgctgaagctggtaagtaa

SEQ ID NO: 330 - protein, 476 aa, Nostoc punctiforme
MTLQSFGVIGLAVMGENIALNVERNGFPIAVYNRSREKTDAFMAQRATGRNVKAAFTLEEFVALLERPRKILVMVQAGKPVDAVIAQLKPLLEEGDIIIDGGNSWFEDTERRTQELEPAGLRYLGMGVSGGEEGALNGPSLMPGGTTSSYEFLSPIFNKIAAQVDDGPCVTYIGPGGSGHYVKMVHNGIEYGDMQLIAEAYDLLKNVAGLNPSQLHDVFAEWNTTDELDSFLIEITKNIFPYIDPETNKPLVDLIVDAAGQKGTGRWTVQTALELGVAIPTITAAVNARIISSIKDERVAASKVLTGPSGKYDGQTKDFINKVRDALYCSKICSYAQGMALLSTASKTYNWNLDLGEMARIWKGGCIIRARFLNKIKKAFSENPALPNLLLAPEFKQTILDRQTAWREVIATAATVGIPVPAFSASLDYFDSYRRDRLPQNLTQAQRDYFGAHTYLRLDKPGSFHTEWVPIAEAGK

SEQ ID NO: 331 - DNA, 1796 bp, Nicotiana tabacum
gaagccacagtgtttgtagaagagaattagaccccgtcacctaaagtttgtttctctccatccataaaacttcacattgggtaggtgacaacatggcttctccgacaagaattggtcttgctggccttgctgttatgggccaaaatcttgctctcaatattgctgagaaaggattccctatatctgtttacaaccgaaccacttcaaaagttgacgagactgttgaacgagctaaaaaagaaggagatcttcctctttatggctttcatgacccagagtcctttgtgaattctatccaaaagcctcgcgtgataatcattcttgtcaaggctggagcaccagttgatcagaccatcaaaaccctttcggcttacatggagaaaggagactgtatcattgatggtggaaacgaatggtatgagaacacagagaggagagagaaagaaatggctgagttaggtcttctttatcttgggatgggagtttcaggtggtgaagagggggctcgaaatggaccttcactgatgcctggaggctcttttgaagcctacaagtacatagaagatatcttactaaaggtcgctgctcaagttcctgatagcggaccttgtgttacatacattggtaaaggtggttctggcaattttgttaagatggtccacaatggaattgaatatggtgatatgcaattgattgcggaggcttatgatgttctgaaatctgttgggaagctctctaacgatgagttgcaacaagttttctcagaatggaacaaaggggagcttctgagcttcttgattgaaatcacagctgatatatttggaatcaaggatgacaaagcagatggatatttagtagacaaggttctggacaagactggaatgaaaggtactggtaaatggactgttcagcaagctgctgaactgtcagttgctgctcctactatagcgtcatcactggattcaagattccttagtggattgaaggatgaaagggtgcaggcagccaaagttttcaaatctagcggggttagcgatatacttgttgaacagtctgtggataagaagcaattgattgacgatgtgagaaaagcactctatgcatcaaaagtatgtagctatgcccagggaatgaatttgataagggcaaagagtgttgaaaagggatgggacttgaaactaggggagcttgctaggatttggaaaggtggttgcattatccgtgctatatttttggatcgtatcaagcaggcttatgacagaaatccagatctcgctaacctgcttgtggatgaagaatttgcaaaggaggtagttgaacgacagtctgcctggcgaagagtggtctgcctttctataagctcgggtatcagcacacctggtatgtcttcaagtcttgcttatttcgactcataccggagggaaaggcttcccgcaaatttggtccaagctcaaagggattactttggtgctcatacttatgagaggactgatatgccgggggcatttcatactgagtggttcaagattgccaaacagtcgaagatctgagtttcttctggttacattcttgccattgacctaattgaataaagttcatgttgtcactgaatctgggaagagagatcctgtggtatcacatcttgtcatctggtctctcaggtgttgaaatttccctatgtttgttgtggagcctatttgtatttctagtccttggcagcttttttctcgtgttatgttttccaagttactgaaaactctcatacaagcaaagaaagtattatccttgttttggat

SEQ ID NO: 332 - protein, 485 aa, Nicotiana tabacum
MASPTRIGLAGLAVMGQNLALNIAEKGFPISVYNRTTSKVDETVERAKKEGDLPLYGFHDPESFVNSIQKPRVIIILVKAGAPVDQTIKTLSAYMEKGDCIIDGGNEWYENTERREKEMAELGLLYLGMGVSGGEEGARNGPSLMPGGSFEAYKYIEDILLKVAAQVPDSGPCVTYIGKGGSGNFVKMVHNGIEYGDMQLIAEAYDVLKSVGKLSNDELQQVFSEWNKGELLSFLIEITADIFGIKDDKADGYLVDKVLDKTGMKGTGKWTVQQAAELSVAAPTIASSLDSRFLSGLKDERVQAAKVFKSSGVSDILVEQSVDKKQLIDDVRKALYASKVCSYAQGMNLIRAKSVEKGWDLKLGELARIWKGGCIIRAIFLDRIKQAYDRNPDLANLLVDEEFAKEVVERQSAWRRVVCLSISSGISTPGMSSSLAYFDSYRRERLPANLVQAQRDYFGAHTYERTDMPGAFHTEWFKIAKQSKI

SEQ ID NO: 333 - DNA, 1925 bp, Ocimum basilicum
gatccatttccttgttttctcctccaattaattactccaatcaatacgcttttcttctctgccaaatttccagatttttgtttcacgggagacccattgctgcctaccccaattcagttgagcagaacatcaagtcaggagaaagagatggctgagcaatctacaaaacggaccagaataggcctcgctgggcttgctgttatgggacaaaatctggccctcaacattgctgagaaaggcttccccatttctgtttataaccggactacatctaaagtcgatgaaactattgaaagagcaaaagctgaaggaaatcttccagtttttggcttccatgatccagaatcatttgtctactccatccagaaacctcgcgtgatcatcatgctagtcaaggctggggcgcccgttgatcagaccatcaaaacactctctgcttacatggagaaaggcgattgcatcattgatggtggaaacgagtggtatgagaatactgagagaagggagaaagctgcagctgaattaggccttctctacctcggtatgggagtttctggtggtgaagagggtgctcgaaatggaccttcactgatgcctggaggctcattcgaagcctacaaatacatcgaagacatcgtcctaaaagtagcagctcaagttcctgacagtggcccctgtgtgacctacattggcaaaggaggatcagggaattttgttaagatgatccataatggaattgaatatggtgatatgcagctgattgctgaggcttacgacgtgctgaaatcagttggaaaactgtcaaatgaggagctgaaaaacgtcttctcagactggaacaagggtgagctccagagcttcttgattgagatcactgctgatatcttcggcatcaaggatgacaagggagaaggctatttggtcgacaaggtgctggacaaaacgggtatgaaaggcaccggtaaatggacagttcagcaagctgcagagctctcaattgcagcccccaccatcgaagcctctctagattcaagattcctaagcgggttgaaggaggaaagaaccgaggctgctaaagtcttcaaatctggtggctttggagacattatagctgatcaagaggttgacaaggagaagctgattcatgatgtgaggcaggctctctacgcatctaaaatatgtagttatgcccaaggaatgaatctgatccgcgcaaagagcattgagaagggatgggagctgaagttgggtgagctggcaagaatctggaagggtggctgcatcatccgtgctatcttcttggatcgaatcaagaaggcttacgataggaatgctgatctggccaacctgcttgtggaccctgaatttgcaaaggaaatcattgagaggcagtctgcttggagaagagtggtgtctcttgcaatcaactcgggcatcagcactcctggaatgtcagctagccttgcgtattttgatacttacagaagggagagattgccagctaatctggtacaagctcagagagactattttggtgctcatacatatgaaagggttgatattccagggtcctaccacactgagtggtttaagattgctaagaacatcaataactgaggcttctctttcgagttccctaataaataatttgcatgattcataaatgtcatttgacatgacccccatcctcatatcgttctagctggcaggatacaagatctcaaagtttcgatgaagtttccattattctggctcacttttgttgtgattgccgttattgtactttgcttttgtatttcatatttactttatctcatcctttgaagaagtgtgttatcactggaaggtttgaggttttctacatttatctatatgaaatgtctgatatcttgagattacatggagtttgttgttgagatgtttcg

SEQ ID NO: 334 - protein, 489 aa, Ocimum basilicum
MAEQSTKRTRIGLAGLAVMGQNLALNIAEKGFPISVYNRTTSKVDETIERAKAEGNLPVFGFHDPESFVYSIQKPRVIIMLVKAGAPVDQTIKTLSAYMEKGDCIIDGGNEWYENTERREKAAAELGLLYLGMGVSGGEEGARNGPSLMPGGSFEAYKYIEDIVLKVAAQVPDSGPCVTYIGKGGSGNFVKMIHNGIEYGDMQLIAEAYDVLKSVGKLSNEELKNVFSDWNKGELQSFLIEITADIFGIKDDKGEGYLVDKVLDKTGMKGTGKWTVQQAAELSIAAPTIEASLDSRFLSGLKEERTEAAKVFKSGGFGDIIADQEVDKEKLIHDVRQALYASKICSYAQGMNLIRAKSIEKGWELKLGELARIWKGGCIIRAIFLDRIKKAYDRNADLANLLVDPEFAKEIIERQSAWRRVVSLAINSGISTPGMSASLAYFDTYRRERLPANLVQAQRDYFGAHTYERVDIPGSYHTEWFKIAKNINN

SEQ ID NO: 335 - DNA, 1754 bp, Ostreococcus lucimarinus
gattgcgcgacgcggccatggcgtgcgcggcgagatcggcgacgacgaacgcgacgacggcggcgcggagacgcgaagcgacgacgcgcgcgggacgacgacgcgggatgacggcgacggcgcgcgcgacggcggcgaacggggcgggcgaaaagtcgcggatcgggctgtgcggactcgcggtgatgggacaaaacctggcgctgaacgtggcggagaagggattcgacatctcggtgtacaatcgatcgagcgataagacggacgtgtgcgtcgaacgggcgaagaaggagggattgggggcgaaactgcgagggtatcacgagatgaaggatttcgtggcgtcgctggcgaagccgcgatgcgtgataatcttggtgaaagcgggcgcgcccgtggacgccacgatcgcgggattgtcgcagtttctcgaacctggagattgcatcatcgatggtgggaacgagtggtacgaaaacaccgaacgacgatcgaaggaggcggcggagaagggattgctgtacgtcggcatgggcgtgagcggaggcgaggagggcgcgcgcaacggaccgtccatgatgccgggtgggtccaaggaagcgtacgatatcatcgctgatatcttaaagcccgtgagcgcgcagaccgattcgggggcgtgcgtgacgtacgtcggcccaggaggcgccgggaactttgtcaagatggtgcacaacggcatcgagtacggcgacatgcaactcatctccgaagcgtacgacgtgttgaaaaccgtcggcgggttgacgaacgatgaactcgcggctgcgttcacggaatggaacgaggcggagttggaatcgtacctcatcgagatctccagcatcattttggccaagaaggacgaccagtctggcaagagcgacgactttttggtggacaagatcctcgacaagactggcatgaagggcactggaaagtggacggtgcagcaagccgcggaattgtccatcgctgcgccgacgatcgcgagctctcttgacgcccgatgcttgtccggattgaaggatgaacgcgtcaacgccgaggcgttttacgccaagctcggcttggcacccgccggcgccatgggcccggcggacaaaaagcaactcatcaacgacgtgcgatatgctctgtacgcttccaaggtgacttcctacgcccaaggcatgaacctgattcgcgccaagtccaacgagcaaggctggaacttgaacctcggcgaaatggcgcgcatctggaagggcggctgcatcattcgcgccggcttcttggaccgcatcaagaacgcttacgaccgagactccaagctcccgtctcttctcgttgacgagcagttcgccaaggaaatgatcgaacgcgaagcttcgtggcgtcgcgtcgtcaccgccgccatcaacgccggtgtttccgtgccgtccatgagcggttctctcgcgtactttgacacttaccgccgcgcgcgctcgccggcaaacttggtgcaagcgcagcgtgacttcttcggttcgcacacgtacgaacgcaccgacatggaaggctggtatcacacgctctggagtgatatgaacagcgctgacagcatcaccacgtctggctacaaggcgtaaataaaagcgatgatggtccgtcgcccgtcgggatttttgttttattcaccgatgagggagcttttccttctcttagcgcgcgccgcaagcatgcctgcttcatagtaaattcgctcaggcgtt

SEQ ID NO: 336 - protein, 537 aa, Ostreococcus lucimarinus
MACAARSATTNATTAARRREATTRAGRRRGMTATARATAANGAGEKSRIGLCGLAVMGQNLALNVAEKGFDISVYNRSSDKTDVCVERAKKEGLGAKLRGYHEMKDFVASLAKPRCVIILVKAGAPVDATIAGLSQFLEPGDCIIDGGNEWYENTERRSKEAAEKGLLYVGMGVSGGEEGARNGPSMMPGGSKEAYDIIADILKPVSAQTDSGACVTYVGPGGAGNFVKMVHNGIEYGDMQLISEAYDVLKTVGGLTNDELAAAFTEWNEAELESYLIEISSIILAKKDDQSGKSDDFLVDKILDKTGMKGTGKWTVQQAAELSIAAPTIASSLDARCLSGLKDERVNAEAFYAKLGLAPAGAMGPADKKQLINDVRYALYASKVTSYAQGMNLIRAKSNEQGWNLNLGEMARIWKGGCIIRAGFLDRIKNAYDRDSKLPSLLVDEQFAKEMIEREASWRRVVTAAINAGVSVPSMSGSLAYFDTYRRARSPANLVQAQRDFFGSHTYERTDMEGWYHTLWSDMNSADSITTSGYKA

SEQ ID NO: 337 - DNA, 1757 bp, Oryza sativa
gctgcacgcctttccgcgatttcgtcagttacccagatctcatcttacgcaggcagagatggctgtcactagaattggtcttgctggccttgcggtcatggggcagaaccttgccctcaacattgcagagaaagggttccctatctctgtctacaacaggacgacttctaaggttgatgagaccgttcagcgcgccaaggtagaaggaaaccttcctgtgtacgggttccatgaccctgcatcctttgtgaactccattcagaagccacgtgttgtcatcatgcttgtcaaggctggtgcaccagtggaccagaccattgcaactcttgcagcacacttggagcagggtgactgtattattgatggaggaaatgagtggtacgagaacactgagaggagggagaaggcaatggaggagcgtggcctcctctatcttgggatgggtgtttccggaggagaggagggtgcccgcaatggcccgtccttgatgcctggtggctcattcgaggcgtacaagtacattgaagatattcttctcaaggtggctgcccaggttcctgatagtggcccgtgcgtcacatacattggcaaaggtggatctggaaactttgtcaagatggttcacaacggaattgagtatggtgacatgcaactgatttctgaggcatatgatgttctcaagtcagttggtaagctcacaaacagtgagctgcagcaggtgttttctgagtggaacaagggtgagctcctcagtttcctgattgagatcacagccgacatatttagcatcaaggatgaccagggttcaggccacctggtcgacaaggtcctggacaagactgggatgaagggaactgggaagtggactgtgcagcaggccgcagagctttctgtggctgctcctacaattgaggcatccttggattccaggttcctcagtgggttgaaggatgagcgtgttgaggctgccaaggtcttccaaggtgacttctccagcaacttgccagtggacaaggcacagctgattgaagacgtgaggcaggctctttacgcctcgaagatctgcagctacgctcagggcatgaacatcatcaaggccaagagcatggagaaagggtggagcctcaacctcggtgagctagcgaggatctggaagggagggtgcatcatccgtgccatcttcctggaccgcatcaagaaggcctacgacaggaactccgacctcgccaacctgctcgtggaccctgagttcgctcaggagatcatggacaggcaagcggcatggcgcagggtggtctgccttgccatcaacaatggcgtcagcaccccaggcatgtcggcgagtctcgcgtacttcgactcctaccggagggacaggctgcctgccaacctggtgcaggcacagagggactatttcggggctcacacctacgagagggtcgacatgcccggctccttccacaccgagtggttcaagatcgcgcgtgctgctaagatgtgaaatgcttcaaattttcggtaatatttggttgctgcttgctgctgagtcgcttgtagggtgggaggaactgttgttaaattttatggtcaatgtgctacgcttaatttggataaggaggtccatagctatctccattcttttaatgtaaggagcagcccagggtggagagaacatggatatttatcattggaacctttgttgtgatctttgtaagtctatatatgaataaaagcattttggcaatgcttgctttttt

SEQ ID NO: 338 - protein, 480 aa, Oryza sativa
MAVTRIGLAGLAVMGQNLALNIAEKGFPISVYNRTTSKVDETVQRAKVEGNLPVYGFHDPASFVNSIQKPRVVIMLVKAGAPVDQTIATLAAHLEQGDCIIDGGNEWYENTERREKAMEERGLLYLGMGVSGGEEGARNGPSLMPGGSFEAYKYIEDILLKVAAQVPDSGPCVTYIGKGGSGNFVKMVHNGIEYGDMQLISEAYDVLKSVGKLTNSELQQVFSEWNKGELLSFLIEITADIFSIKDDQGSGHLVDKVLDKTGMKGTGKWTVQQAAELSVAAPTIEASLDSRFLSGLKDERVEAAKVFQGDFSSNLPVDKAQLIEDVRQALYASKICSYAQGMNIIKAKSMEKGWSLNLGELARIWKGGCIIRAIFLDRIKKAYDRNSDLANLLVDPEFAQEIMDRQAAWRRVVCLAINNGVSTPGMSASLAYFDSYRRDRLPANLVQAQRDYFGAHTYERVDMPGSFHTEWFKIARAAKM

SEQ ID NO: 339 - DNA, 1890 bp, Oryza sativa
atctcttcaccattctcaacccccccccccccccatctccacctcctcctcctccgccgccgccgaacccgatggcctccccggcgccggcgccgcccgcggcctcctcctccgcggcggggtccgccccgccgccgcgcatcggcctcgcggggctcgccaccatgggccagaacctcgccctcaacatcgccgagaagggcttcccgatctccgtctacaaccgcaccgccgccaaggtcgacgccaccgtgtcccgcgccgaggccgagggcgcgctcccggtgctcggccaccgcgacccgcggggcttcgtcctctccctctccaggccccgcaccgtcgtgctgctcgtccaggccgggcgcgccgtcgacgccaccatcgacgcgctcgtcccctacctcgacgccggggacgccatcgtcgacggcgggaacgagtggtaccagaacacggagcggcggatcgaggaggccgccgcgagggggatactctacctcgggatgggggtctccggcggcgaggagggcgcgcggaacgggccctcgctgatgccggggggccacatcgacgcctacaacaacatcagggacatcctcgagaaggccgccgcgcagacggaggatggggcgtgcgtcaccttcgtcggccccggcggcgcgggcaacttcgttaagatggtgcacaacgggatcgagtacggcgacatgcagctcatcgccgaggcctacgacgtgctccgccgcgtcggcggcctgtccaactcggagatcgctgacgtcttcgcggagtggaaccggggggaattggagagtttcttggttgagattactgccgatatattcacggtggccgacccgcttgatggcagcggcggcggtgggctggtggacaagattcttgacaagacggggatgaagggaaccgggaagtggacggtgcagcaggcagcagagcttgcgattgctgcgcccacgattgcagcatcactggatgggaggtacttgtctgggttgaaggacgagcgtgtggcggccgcaggggttctagaggcggaggggatgccatcagggctactcgagacgattaatgttgataagaagatgctagttgacagggtgaggcaagctctgtatgcgtcaaagatttgcagctacgcgcaggggatgaaccttctgcgagcaaagagtgtggagaaggggtggaatcttaacctcgcagagcttgcaaggatttggaagggcgggtgcattatccgggcgaagtttcttgataggatcaagaaggcgtatgacaggaaccctgagctggccaatctgatcgtggacagggagtttgcaagggagatggttcagcggcagaatgcatggcggtgggttgtggctcgtgctgtggaggctgggattagcactccagggatgtctgctagcctttcatactttgacacctacaggtgtagtcggctgcctgcaaatctgatccaagcacagagagacttgtttggggcacacacctatgagcgcattgaccgtccaggttcgttccacacagagtggactaagctggcgagaaagagtaatggtgcggccatttgaggacttgaatggtatcagtaactctgtgtggtgtctctttgtgggttctctttgaattcactactgttgtctttatgattctaggtctgaattctgtactttgaataatgaagtgtcatgtgcggtatgcatggaaggaacattcatgtagcttgtgcttttatatggtctaggtgcacccattcagttttctcataaatttggaatgcaatggttttaccctcttatcaaatccctgtaattttgatctggcatgtgtcattatagctagtaagacacgtgatgtttggcc

SEQ ID NO: 340 - protein, 508 aa, Oryza sativa
MASPAPAPPAASSSAAGSAPPPRIGLAGLATMGQNLALNIAEKGFPISVYNRTAAKVDATVSRAEAEGALPVLGHRDPRGFVLSLSRPRTVVLLVQAGRAVDATIDALVPYLDAGDAIVDGGNEWYQNTERRIEEAAARGILYLGMGVSGGEEGARNGPSLMPGGHIDAYNNIRDILEKAAAQTEDGACVTFVGPGGAGNFVKMVHNGIEYGDMQLIAEAYDVLRRVGGLSNSEIADVFAEWNRGELESFLVEITADIFTVADPLDGSGGGGLVDKILDKTGMKGTGKWTVQQAAELAIAAPTIAASLDGRYLSGLKDERVAAAGVLEAEGMPSGLLETINVDKKMLVDRVRQALYASKICSYAQGMNLLRAKSVEKGWNLNLAELARIWKGGCIIRAKFLDRIKKAYDRNPELANLIVDREFAREMVQRQNAWRWVVARAVEAGISTPGMSASLSYFDTYRCSRLPANLIQAQRDLFGAHTYERIDRPGSFHTEWTKLARKSNGAAI

SEQ ID NO: 341 - DNA, 1882 bp, Physcomitrella patens
gtgggtctcggctatggcatcgatgtatgaatagaaagcattggtgagacgatcagtttgttagagatcggtcggtgtctggcttcgatagggtctggtgaagagcgagcgcaacactgcgttgtgaattgggtatccgtcttggaagggaatcgggtgccgggtgggggagagatggcgtccgatggcctttcgagaattgggttggcggggttggcagtgatgggtcagaacttggctctcaacattgcggagaagggtttcccgatttcggtctacaatcgatcagcgagcaaggtggatgagaccgtagagcgcgcgaaggaggaggggaatttgcccgtgaaggggttcaaagatccctgcgagtttgtgaagtcgattcagaagccgcgatgtatcatcatcttggtgaaggcagggtcgccggttgatcagaccatcgagctcttgtcgaagtacctcgagaagggggactgtatcattgatggagggaatgagtggtacgagaatacggagaggagggcggagaaggtgaaggagaagggtttgttgtacctggggatgggagtcagtggaggcgaggagggtgctcgacatggaccttcgctcatgcccggaggaactctagaagcgtacaagtacattgaagacattgtgcagaaagtggctgcgcaagtcgacagtggtccatgtgtgacctacgttggccccggaggcgctggcaacttcgtcaaaatggtgcataatggaattgagtacggtgacatggagctcatcgccgaggcgtacgatgtgctcaaatccgtgggtggtttatcgaacaaggagctgcacgaaaccttctacgagtggaacaagggcgaacttgaaagctttctaatcgaaatcactgctgatattttctctgtcccggatgacaagggtgaaggagaactcgtcgataaagtgctggacaagacgggcatgaagggtactggcaagtggaccgtgcagcaagctgccgaattatctgtggccgctcctactattgcgacatccctagacttgcgatacctttcaggtttgaaagaggaacgcgtggaagccgccaaagtattcaaaagtttgggagtcagtgatttattagcagaggttaaagttgacaaacaggagctcatcgacaacgtccgaaaagccctgtatgcctcgaagatttgcagttacgcgcaaggcatgaacctcattcgtgcaaagagcattgagaagggttggaatttggacctcggagaactcgctcgtatttggaaaggtgggtgcattattcgagccaagtttttggaccgcattaagcaagcttacgacagggacccaaaattggcaagcttgttgatagaccctgaatttgcgaaggagatggtagagagacaaggtgcatggaggaaggttgtgtctttggcaatcgaagttggggtgagcaccccaggtatgagcgccagtctcggttactttgatacgtacaggcgagctcggcttccagcaaatcttgtccaagctcagcgcgattactttggttcccatacttacgagcgtgttgacatgaaagactccttccacacggagtggtacaagattgcgaagaagctgttgggcgacagggcggctactgagggtgacctcaaaatcggctccaaagagcagaagcattaggtgtacgtacgcagtgcatgtaagaaggtaactacagacttgtaaattcaccgccgatctttattaattcgagggaatcgagcttgtaattagctaattctgagcccgattagggtcagagtgagcaccctggggctagaaatgtgctgcacgacgggcataaataataaatgcattgcaccccgattctggt

SEQ ID NO: 342 - protein, 504 aa, Physcomitrella patens
MASDGLSRIGLAGLAVMGQNLALNIAEKGFPISVYNRSASKVDETVERAKEEGNLPVKGFKDPCEFVKSIQKPRCIIILVKAGSPVDQTIELLSKYLEKGDCIIDGGNEWYENTERRAEKVKEKGLLYLGMGVSGGEEGARHGPSLMPGGTLEAYKYIEDIVQKVAAQVDSGPCVTYVGPGGAGNFVKMVHNGIEYGDMELIAEAYDVLKSVGGLSNKELHETFYEWNKGELESFLIEITADIFSVPDDKGEGELVDKVLDKTGMKGTGKWTVQQAAELSVAAPTIATSLDLRYLSGLKEERVEAAKVFKSLGVSDLLAEVKVDKQELIDNVRKALYASKICSYAQGMNLIRAKSIEKGWNLDLGELARIWKGGCIIRAKFLDRIKQAYDRDPKLASLLIDPEFAKEMVERQGAWRKVVSLAIEVGVSTPGMSASLGYFDTYRRARLPANLVQAQRDYFGSHTYERVDMKDSFHTEWYKIAKKLLGDRAATEGDLKIGSKEQKH

SEQ ID NO: 343 - DNA, 2100 bp, Physcomitrella patens
aggcctatcacattgttttgcccatttggcatcaagacattgcgatatcttccacgctggtgcttcttctcaatccttttctctcgcttacccaccttgtgtattgctcgcattctgactctacggtgaggttcttgagtttttctgtgggttctcgagaaggatttgagcaatggcggaagcagttgctgccggagtgggggtgtcgagaatcggtctggctggtttggccgtcatgggccagaacctagccctgaacattgcggagaaggggttcccaatatccgtgtacaatcggacggactctaaggttgatgagactgtggagcgggcgaaggaagagggcgatttgcctctggttggattcaaggatcccaaggagtttgtgttgtccatccagaaaccccgctccatcatcattctggtgaaagctggcgcgcctgttgaccagaccatccagactctgtcgcagtacatggagcctggcgattgtatcattgacggagggaatgagtggtacgagaataccgagaggagggcgaagcaggttgctgagaaagggctgttgtacttgggaatgggagtctcgggtggagaggaaggagcccgtaatggaccttctatgatgcccggtggcacagaggaggcctaccattatatcgaagatgtggtctcgaaggtcgccgcccaagttgacgatgggccgtgtgtgacatatgtaggccaaggcggggccggaaactacgttaaaatgattcacaatggaatcgaatatggtgacatgcagctgatctcggaggcttacgatgtgttgaagtcagtcggaggattgacaaatgaagaattgcatgagactttcgctgagtggaatgaaggagaactggagagtttcctggttgaaatcactcgtgacattttctccgtcaaggatgacaaggctgagggattccttgtcgacaaaatcctcgacaagacgggcatgaaaggaactgggaagtggaccgtgcagcaggccgcggagctttccattgcggctcccaccattgctgcttcacttgattctcgtttcctttcagggttgaaggaggagcgcctggaagcggcacgtatattcaaggaagccggagttgatgatatcatagctgtgaagaaccttgacaagaaagtgctcgtcgatgacgttagaaaggctctatatgcctccaaaatctgtagctatgcgcaaggcatgaacctcatccgtgccaagagcattgagcaaggctggaaccttaacctcggtgagctcgcccgcatctggaagggaggctgcatcatcagggccaaatttctcgaccgcatcaaaaaggcttacgaccgcaaccctgagctcgcatctcttctgatagatcccgaattcaccaaggagatggtggaaagacaatctgcatggcgccgagtggtgtctctggctattgaggtcggtgtgtctactcccggtatgactgccagtcttgcatacttcgacacgtatcggagaggtcgccttccagccaacctcgtccaagctcaacgggactactttggtgcccacacatacgagcgtattgatatgcccggatcttaccacacggagtggtttaagattgccaagcaattcgtgaactccaagacccctgtgaaggcctcggcttagataaactcccaagatatgagtcaattctcaagtatcctctggtactcccttcgaagaggtccataaattaggtgagctattcgcatctgtacaattagaggtggtggacctggtctggtctttagcaattggttctagacatcaatcaaattttgtaccttttgtctgggcaagttattagttaggtgctagctttatgtggtgttgtgatgagaatctgataagggaatgagaatggttcgctctaccatcattcgcattcagcgtgctgcgcactccatcatgacgtttcattcatgatggatcctcaagtgcataggtactctggtatgtagcatttgaacattgtattgaattctcaattgtaaccgagcttgtaaccgaacctattgaaacacgttttgaaattttactgttttcttttc

SEQ ID NO: 344 - protein, 500 aa, Physcomitrella patens
MAEAVAAGVGVSRIGLAGLAVMGQNLALNIAEKGFPISVYNRTDSKVDETVERAKEEGDLPLVGFKDPKEFVLSIQKPRSIIILVKAGAPVDQTIQTLSQYMEPGDCIIDGGNEWYENTERRAKQVAEKGLLYLGMGVSGGEEGARNGPSMMPGGTEEAYHYIEDVVSKVAAQVDDGPCVTYVGQGGAGNYVKMIHNGIEYGDMQLISEAYDVLKSVGGLTNEELHETFAEWNEGELESFLVEITRDIFSVKDDKAEGFLVDKILDKTGMKGTGKWTVQQAAELSIAAPTIAASLDSRFLSGLKEERLEAARIFKEAGVDDIIAVKNLDKKVLVDDVRKALYASKICSYAQGMNLIRAKSIEQGWNLNLGELARIWKGGCIIRAKFLDRIKKAYDRNPELASLLIDPEFTKEMVERQSAWRRVVSLAIEVGVSTPGMTASLAYFDTYRRGRLPANLVQAQRDYFGAHTYERIDMPGSYHTEWFKIAKQFVNSKTPVKASA

SEQ ID NO: 345 - DNA, 1981 bp, Prunus persica
cccagatcttcgccttcctggttttgctcagattttcaatccagttctttcgttagagaagaaaacgttcagacagaggaaaagatggctgcaccaccgaaacctacaagaataggccttgctggtttggctgtcatgggccaaaatttggccctcaacattgcagagaaaggcttccccatttcagtatataatagaactacctccaaagttgatgagactgttgagcgagctaaaaatgaaggaaatcttcccctttatggcttccatgatcctgaatcttttgttaattcaatccagaaacctcgggtcattatcatgcttgtcaaggctggggcacctgttgaccagaccataaagaccctctccgtctacctggagaagggtgacagcattattgatgggggtaatgagtggtatgaaaatactgagaggagggcgaaagccatggctgaattaggtcttctttaccttggaatgggagtttcaggtggtgaagagggggctcgatatgggccctctatgatgcctggaggatcctttgaggcctataagtacattgaagacattcttcttaaggtgtcagctcaagttccagacagtggcccctgtgtgacttacattggcaaaggtgggtctggtaactttgttaagatgattcataatgggattgaatatggtgatatgcagctgatagcagaggcttatgatgtactgaagtcagttggaaagctgtcaaatgaggaactccgaagcgttttctcagagtggaacaagggagagcttctgagcttcctgattgaaatcactgcagatatatttggaatcaaggatgataagggagatggatatttggttgacaaggttttggacaagactggcatgaagggtactggtaaatggactgttcagcaagctgctgaactatcagttgcagctcccacaattgaatcttctttggatgcaaggtttctcagtggtttaaaggaagagagggttaaagcagctaaagtgttcaaatcagctggttttggtgatatcttgactgccccagaggtggataaggcaaagttgatcgatgatgtgaggcaagctctttatgcatccaagatatgcagttatgcacaagggatgaatcttatccgtgcaaagagtattgagcagggatgggacttgaagttgggggagttggctaggatttggaaggggggctgcatcattcgagcagtgttcctggacagaattaagcaggcatatgataggaatgctgatcttgcaaatcttcttgtggacccagagttttcaaaggagatcattgagaggcagtctgcctggagaagggtggtatgccttgctatcaactcaggcatcagcaccccaggtatgtcagctagtcttgcttattttgacagctacaggagggagagactgccggctaatttggtccaagctcagcgagactactttggtgctcatacatatgaaagaactgatgtagaaggtgctttccatactgaatggttcaaaattgccaaacagtcaaagatttaagtccatcttctttggcattctacttaagcagaactctcctttatcccaataatttctgctgacgattttatgctgggcagagcttcagccaactcttttatcaattttatttaaatcaaggagtgtgcattagatttggtttgttatgcttgtacttttggcagatctgtcaccctcacagcccttttcatttttggaagatgtaattctagtcattgtggaggactgtggggtagcactctgaaactgtaatgttggaagatgaaaatcaatgaagaaactttcttatattcctcaatgttctgcaggtgttttttttccctctttgtaatttttccttccgttattgacagctttttttactttgctttttgggtgtaaatgcgtttcacgatttgaataatgtggctagcatgtgctaattcacttt

SEQ ID NO: 346 - protein, 488 aa, Prunus persica
MAAPPKPTRIGLAGLAVMGQNLALNIAEKGFPISVYNRTTSKVDETVERAKNEGNLPLYGFHDPESFVNSIQKPRVIIMLVKAGAPVDQTIKTLSVYLEKGDSIIDGGNEWYENTERRAKAMAELGLLYLGMGVSGGEEGARYGPSMMPGGSFEAYKYIEDILLKVSAQVPDSGPCVTYIGKGGSGNFVKMIHNGIEYGDMQLIAEAYDVLKSVGKLSNEELRSVFSEWNKGELLSFLIEITADIFGIKDDKGDGYLVDKVLDKTGMKGTGKWTVQQAAELSVAAPTIESSLDARFLSGLKEERVKAAKVFKSAGFGDILTAPEVDKAKLIDDVRQALYASKICSYAQGMNLIRAKSIEQGWDLKLGELARIWKGGCIIRAVFLDRIKQAYDRNADLANLLVDPEFSKEIIERQSAWRRVVCLAINSGISTPGMSASLAYFDSYRRERLPANLVQAQRDYFGAHTYERTDVEGAFHTEWFKIAKQSKI

SEQ ID NO: 347 - DNA, 1965 bp, Pinus taeda
tacatcgatatttcaaaagctgtgaggttcgatcttgggagctctccacagcaccgaagtgctcgagtgagggagcttcttgctttcagtggaagaggtttttgggttttatggttatatattgatatcccaactcctgtgaggttcgatcgtgggacctctgagtgtttaagtttcttcatttctgttcaagaagtttagagtctctgtggttttccttttgtatcaatggaggcgggggcgctgtcgagaatcgggctcgcgggtctggcagtgatgggccagaacctagccctcaacgtcgcagagaaaggcttcccgatctctgtctataatcgcacagcaagtcgcgtggacgaaaccacggagcgcgcccgggacgaaggcgacctgcccctaaagggctattacaatcccaaggacttcgtgctttcgatcaagaagccgaggtcagtgatcatccttgtcaaggcgggggcgccagttgaccagacaatctccacgctctccgactacatggagcctggcgattgcatcgtcgatgggggcaacgagtggtacgagaacacggagcggcgggcaaagcaggtcgctgagaagggcttgctgtatttgggaatgggggtctctggtggtgaggagggggctcgctatggcccgtcgctaatgcctggtggcaccatcgaggcttacaggtatatcgaagacgtcctcaccaaggtcgctgcgcaggtcgatgacgggccctgcgttacgtacgttggcaacggaggggccgggaactttgtcaaaatggttcacaatggcatagagtatggagacatgcagttgatctccgaagcatatgatgtgctcaagattgttggaggtctgagcaatcaggaactggcggagacctttgcggagtggaacaaaggtgagctcgagagctttttggttgagataactgccgatatttttactgtgaaggatgatcatggcggtggggagcttgtagataagatattggataagaccggaatgaaggggactgggaaatggactgtgcagcaggctgcagagctctctgttgcagcacccacaattgctgcctcgcttgattgcaggtatctcagtggcctgaaagaggagcgcgaggccgctgcgaagattttcaaagaggccggcctgcctgatgttttggttggtggaggtaccgtcgacaagaggcaattggtcgatgatgtccgcaaggcgctgtacgcgtcaaagatctgcagctatgcacaggggatgaatctgcttcgcgctaagagtacggagaaggcgtggaatctgaatctcggggaattggctcgtatctggaaagggggctgcattatcagggctattttcttggatcggatcaagaaggcctatgaccggaacccgcagcttccgagtcttttggtcgatccggagtttgcgagagagatggtggagaggcaggctgcttggaggagagtggtgaatttggcaatcaatgctggaatcagcaccccaggaatgaatacaagtctggcctattttgacacttaccgccgtgcccggttgcctgccaatcttgtccaggcacaacgggacctgttcggtgcacacacctatgagcggatcgatcgccctggttctttccacacagaatggacaaagattgctaagcagaacaaagaatacaagtgaagttgctatccaggttcaaattatgcttctgttgacaaaattcaaattcttaagcaggcaccctgagttctgcccgtcagttttgaatttcgtttgacatatagagctatttttcagttaagcgcatctttccggccttttttcttattccagtgggcatggttcatttatgacctgattctaggaaaattgaaaactatgggcttttactttttccaaatattgcatccaataaatgaatggcattggaagaaagttaatggtttt

SEQ ID NO: 348 - protein, 489 aa, Pinus taeda
MEAGALSRIGLAGLAVMGQNLALNVAEKGFPISVYNRTASRVDETTERARDEGDLPLKGYYNPKDFVLSIKKPRSVIILVKAGAPVDQTISTLSDYMEPGDCIVDGGNEWYENTERRAKQVAEKGLLYLGMGVSGGEEGARYGPSLMPGGTIEAYRYIEDVLTKVAAQVDDGPCVTYVGNGGAGNFVKMVHNGIEYGDMQLISEAYDVLKIVGGLSNQELAETFAEWNKGELESFLVEITADIFTVKDDHGGGELVDKILDKTGMKGTGKWTVQQAAELSVAAPTIAASLDCRYLSGLKEEREAAAKIFKEAGLPDVLVGGGTVDKRQLVDDVRKALYASKICSYAQGMNLLRAKSTEKAWNLNLGELARIWKGGCIIRAIFLDRIKKAYDRNPQLPSLLVDPEFAREMVERQAAWRRVVNLAINAGISTPGMNTSLAYFDTYRRARLPANLVQAQRDLFGAHTYERIDRPGSFHTEWTKIAKQNKEYK

SEQ ID NO: 349 - DNA, 1932 bp, Pinus taeda
ttcgttccgacgctctcccccctgtcggaaccagttcctttcggtgtaagaggttgttcgagttctgtgattgcttgttactccaatggagggagcagtgctgtctaggatcggactggcaggtctggcagtgatgggccagaaccttgccctcaacgtcgcagaaaaaggctttccaatctctgtctacaatcgcacgataagccgcgtggacgaaaccctggaacgcgcacgggacgaaggcaacctcccactgaagggcttctacgaccccaaggacttcgtgctatcgatccagaaaccgagggcagtggtcatcctcgtcaaggccggggctccggtcgaccagaccatttcgacgctcacggagtacatggagcccggcgactgtatcgtagacgggggcaacgagtggtacgagaacaccgagcggagggcaaagcaggtggccgagaagggcttgctctacttgggaatgggggtctccggaggcgaggagggagctcgcaacggcccttcgctcatgcctggtggcaccctcgaggcctacaggtatattgaagacgtggtcaccaaggtcgctgcccaggtggacgatgggccctgcgttacttatgtgggagctggaggtgccgggaattttgtaaaaatggttcacaacggcatcgagtatggagacatgcagttgatctctgaggcctatgatgtgctcaggtatgtcgggggtttgaccaatgaggagctttcggagacctttgcagagtggaacagaggtgagctcgagagctttttggttgagataactgcagatattttcactgtgaaggatgagtatagtgatggggagcttgtggataagatactggataagactggcatgaaggggacaggaaaatggaccgtgcagcaggctgcagagctctctgttgcagcccccactattgctgcctcgcttgattgcaggtatctgagtggcctgaaggaggagcgtgaggctgctgcaaagattttcaaacaggctggcctgtctgatgtcgtggctggtgggggaattgtggacaagaagcagttggttgatgatgtccgcaaggcactgtatgcctctaagatctgcagctatgcccaggggatgaatcttctccgcgccaagagtgcggagaaggcgtggaatctgaactttggggaactggcccgtatctggaaaggcgggtgcattatcagggctgttttcttggatcggatcaagaaggcctacgaacggaacccacagcttgcaagcctcttggttgatccagattttgcgagagagatggttgagagacaggctgcttggagaagggtggtgaatttggcaatcagtgctggcatcagcaccccgggtatgaatacgagtcttgcctattttgatacttaccgccgtgcccggttacctgctaatcttgtccaggcacaacgggacctgttcggtgcacatacctacgaacggatcgattgccctggttctttccatacagaatggacaaagattgctaagcagaacagggctgggctgaaggcctgaaagtgaatttgttccccaggttcaaattatgtttctgctgaacaaattcctatacatgcagcctgagttctgcctgtcagtttgacattaagagccttttttcagcttgcatgctttttttatttcatgattgtaggagagttgaaaattgcatgccttcctttttccagagaatgtatccaataaatgtcacgggtagaatgttatcagagatatttttaggagcaaaatttagccctttggcaaattttgctaaataattttatgtgtgccaatatttttctatgcagttgaaagagcacgactaacaaacccattgaggttttttttttaaatattagatgcagtgcatgggttgttctttccgtttt

SEQ ID NO: 350 - protein, 491 aa, Pinus taeda
MEGAVLSRIGLAGLAVMGQNLALNVAEKGFPISVYNRTISRVDETLERARDEGNLPLKGFYDPKDFVLSIQKPRAVVILVKAGAPVDQTISTLTEYMEPGDCIVDGGNEWYENTERRAKQVAEKGLLYLGMGVSGGEEGARNGPSLMPGGTLEAYRYIEDVVTKVAAQVDDGPCVTYVGAGGAGNFVKMVHNGIEYGDMQLISEAYDVLRYVGGLTNEELSETFAEWNRGELESFLVEITADIFTVKDEYSDGELVDKILDKTGMKGTGKWTVQQAAELSVAAPTIAASLDCRYLSGLKEEREAAAKIFKQAGLSDVVAGGGIVDKKQLVDDVRKALYASKICSYAQGMNLLRAKSAEKAWNLNFGELARIWKGGCIIRAVFLDRIKKAYERNPQLASLLVDPDFAREMVERQAAWRRVVNLAISAGISTPGMNTSLAYFDTYRRARLPANLVQAQRDLFGAHTYERIDCPGSFHTEWTKIAKQNRAGLKA

SEQ ID NO: 351 - DNA, 1919 bp, Pinus taeda
attgctaaactgcaagttctgagttctgaaaatttgaactacccagttgattatctgaggttctgaatacacccaactgaatttgaggcaaatagattatagcccacaagtgcttcagagagtagaagagaaatggcttcgtcagatttgtccagaatagggttggctggcctggctgtgatgggccagaatcttgctctcaatattgcagagaaaggcttccccatctcggtctacaacaggagcagtgaaaaagtggatgagactgttgagagagccaaggttgaaggtaatctgcctgtgaagggcttccatgacccaaaggattttgtgaattcaatccagaagcccagagttataatcctgctcgtcaaagcaggactcccagtggacaaaacaatagaaaccctatccgcccacatggaggaaggggactgcattgtggatggtgggaatgaatggtatgaaaacacagagaggagacaggaggctgccaagcagaaagggctgctgtatttggggatgggagtctctggcggtgaggaaggagccaggcatggcccctctctgatgcccggagggtcatttgaagcctacaagtacatcgaggacatactgctcaaggtggctgcacaggtcgacagtggaccatgtgtgacttacattggtaaaggcggagcaggcaattttgtcaagatggtgcataatggcattgagtatggagacatgcagctcattgcagaggcttatgatgttctcaagtcagtcggtaagctcactaacgaagaactgcaccaggcttttgataattggaataagggggaattgtgtagttttttggtagaaatcactgcggatatctttgggatcaaggatgataagggggatgggtatcttgtggataaagttctcgataaaactggcatgaagggcactggtaagtggactgtgcaacaagctgcagatctgtctgttgcagcccctaccattgctgcttctttggattctaggtttcttagtggattgaaggaggaaagggtggaggcctccaaggtgttcaagaatgtagatgtgggtactgtgccagatttggataagactaagcttattgatgatgtgaggcgggctctgtatgcatctaagatatgtagttatgcccaaggaatgaatctgatccgtgcgaagagcatagaaaagggatgggatttgaaactgggagagctcgcccggatctggaagggtggttgcatcattcgtgcgattttcctcgatcggatcaagaaggcctatgacaggaatccagatctgtttagtctgttggttgatcctgaatttgcaaaggaaatgattgagagacagtcagcgtggcggcgagttgtgactcttgcgatcaacgctggtgtcagcgttccaggtatgtctgcaagtttggcgtactttgattcctatagaagggagagtttgcctgcaaacctggttcaggcacagcgagattatttcggtgctcacacctatgagaggattgatatgcctggtttcttccacactgagtggttcaagattgcaaaacaatcaaagatttgaaattttttagattgtcgaaccccagagagaataagcccatccatgctttaggtttaactgttaaattgcatagtgaattctgttggcaattcatagtttcttaagaaagttttccctatcaattgcttatgtgttttctgtactttttcaaattcaaagaaacaaagaacgtatcgaggtttttgaataaatccttgcttgaatttcaaagcagaaagctactaatctggtgtgttttactggattaagagatcaaattttagctatcttattttaaaaatgaatacagaggcaggctgcttatgttcaaattcgctattttgctgaccagaata

SEQ ID NO: 352 - protein, 483 aa, Pinus taeda
MASSDLSRIGLAGLAVMGQNLALNIAEKGFPISVYNRSSEKVDETVERAKVEGNLPVKGFHDPKDFVNSIQKPRVIILLVKAGLPVDKTIETLSAHMEEGDCIVDGGNEWYENTERRQEAAKQKGLLYLGMGVSGGEEGARHGPSLMPGGSFEAYKYIEDILLKVAAQVDSGPCVTYIGKGGAGNFVKMVHNGIEYGDMQLIAEAYDVLKSVGKLTNEELHQAFDNWNKGELCSFLVEITADIFGIKDDKGDGYLVDKVLDKTGMKGTGKWTVQQAADLSVAAPTIAASLDSRFLSGLKEERVEASKVFKNVDVGTVPDLDKTKLIDDVRRALYASKICSYAQGMNLIRAKSIEKGWDLKLGELARIWKGGCIIRAIFLDRIKKAYDRNPDLFSLLVDPEFAKEMIERQSAWRRVVTLAINAGVSVPGMSASLAYFDSYRRESLPANLVQAQRDYFGAHTYERIDMPGFFHTEWFKIAKQSKI

SEQ ID NO: 353 - DNA, 2003 bp, Populus trichocarpa
atggacgcctctactctttcacgcataggcctagccggtctagccgtgatgggtcagaacttagccctaaacattgctgaaaaaggtttcccaatttcagtctacaacagaaccacctccaaagtcgacgaaacccttcaccgtgcccaatccgaaggcccatttcctttaactggtcagtactcccctcgtgattttgttctctcaatccaacgccccagatccatcattatcttggtcaaagctggaaaccctgttgaccaaacgatttctgctttgaccgagttcatggagcctggtgatactatcatcgatggcgggaatgagtggtatcagaatactgagaggaggattcaagaagtgggagataaagggattctttatttgggtatgggggtttcgggtggagaagaaggtgcacgacatgggccttcgttgatgcctggtgggtctttggaggcgtataataatattgagtctgttttgaagagtgttgccgctcaagttgatgatgggccttgtgttacgtatattggtgaagggggttctggcaattttgttaaaatggttcataatgggattgagtatggagatatgcagttgatttcggaagcctatgatgttttgaagaatgttggtgggctttctaatggcgaattagctgagattttcggggagtggaatagaggggagttggagagttttttgattgagattacgagtgatatttttaaggttaaggatgatttggctgacggggatctggttgataagatattggataaaactggaatgaaagggactgggaaatggactgtccagcaagctgctgagttgtctgttgctgcgcctacaattgctgcttcgttggattgtaggtatttgagtgggttgaaggaggagagggagagtgcggccgagattttggaaaaagctggcttgaaggaggaaatggggagtgttaagagtgagattgacaagaagaggttgattgatgatgtgaggcaagcattgtatgcgtcgaagatttgcagttacgctcaggggatgaatttgttgaggtctaagagtgttgagaaagggtgggatttgaatttgggtgagttagctaggatttggaaaggtggatgcattattagggctgtgtttttggataggattaaaaaggcttaccagaggaatcctagcttggctagtttagttgtggacccggaatttgcgagggagatggtgcagaggcaggcggcatggaggagagtcgtggggctggcgatttcagctggtattagcactccagggatgtgtgctagtcttgcatattttgatacttacaggcgtgctaggctgccagcaaaccttgtccaggctcagagggacttgtttggggctcatacttatgagaggaccgatcgtccaggggcatttcatactgagtggacaaagcttgctcgtaagagcaatgctggttttggagctttcaattgagcatgttcatgagtcggttggctgtttgtttgtttgtttcaattggccgttggtaatgtttctctttgaactatggttgtatgtttccttgagaggattcgttgcagttattggttagcctcacagattttactgttaataagaaatgcatgcctcttgagttcagtaaattggtttttcatctgcagcaggcacgatagagttgagttctgccttttagattttgcttatttgctcctgaataatgtttcgacctcttgtgaggctatttgatttgaaactttgtaatttgcatactttacgtaagtatgtgtatgtccttctagaaataaacctgttcgaatgcatcttatgtgtttatgaaacaattctgatacaaatgtatcataggttacaaggttggttgcaatgtgaaaacgtggttgttgggcaggaatgttaacttcatcataagttcaagttagctgttgatttttttttttttttttgaagtcaatgaacacttgatgatttgttga

SEQ ID NO: 354 - protein, 494 aa, Populus trichocarpa
MDASTLSRIGLAGLAVMGQNLALNIAEKGFPISVYNRTTSKVDETLHRAQSEGPFPLTGQYSPRDFVLSIQRPRSIIILVKAGNPVDQTISALTEFMEPGDTIIDGGNEWYQNTERRIQEVGDKGILYLGMGVSGGEEGARHGPSLMPGGSLEAYNNIESVLKSVAAQVDDGPCVTYIGEGGSGNFVKMVHNGIEYGDMQLISEAYDVLKNVGGLSNGELAEIFGEWNRGELESFLIEITSDIFKVKDDLADGDLVDKILDKTGMKGTGKWTVQQAAELSVAAPTIAASLDCRYLSGLKEERESAAEILEKAGLKEEMGSVKSEIDKKRLIDDVRQALYASKICSYAQGMNLLRSKSVEKGWDLNLGELARIWKGGCIIRAVFLDRIKKAYQRNPSLASLVVDPEFAREMVQRQAAWRRVVGLAISAGISTPGMCASLAYFDTYRRARLPANLVQAQRDLFGAHTYERTDRPGAFHTEWTKLARKSNAGFGAFN

SEQ ID NO: 355 - DNA, 1458 bp, Populus trichocarpa
atggctcccctgaccagaattggcctagctggccttgctgtcatgggtcaaaatcttgccctcaatattgctgagaaaggatttcctatttctgtgtataatcggaccaccttaaaagttgatgagacagttgaacgagccaagcaggagggagatcttcccttatatggtttccatgatcctgaatcctttgttaagtcaatccaaaaacctcgtgtgataatcatacttgttaaggccggtgcccctgtcgaccaaaccatcaaaacactgtcagtttacatggagaaaggggattgtatcatagatggtggtaatgaatggtatgagaacactgagaggagggagaaagccttggctgaattaggtttgctttatcttggaatgggagtttcaggtggtgaagatggtgctcggcatggaccatctttaatgccaggtggttcctttgaggcctacaaacacatagaagatatccttcttaaggtggctgctcaagttcctgatagtggtccttgtgtcacttatattggcaaaggaggatctggcaattttgttaagatggttcacaatgggatagaatatggtgatatgcagctgattgcagaggcctatgatgttctgaaatcagttgggaagctcaccaacgaggaactatgccaggttttctctgaatggaacaagggggagctgctgagtttcttgattgagatcactgcagatatatttggaattaaggatgacaagggagaaggatatttggtcgacaaggtattggataaaactggcatgaagggtactggtaagtggacggttcagcaagctgctgagttgtcagttgctgctcccactatagcgtcatccttggatggaagattcctcagtggcctgaaggaagaaagagttgaagctgcaaaagtcttcaaatcaagcggcatcatagacatgctagctgaccaagtcgtggataaggaaaaattgatctatgatgtgagacaagcactatatgtgtccaaaatatgcagctatgcccagggtatgaacttgatacgtgcaaagagtgctgaaaagggatgggatttgaaactggggcagttaacaaggatttggaagggtggttgcattatccgtgctgtcttcttggaccgtattaagaaggcttatgatagaaacccaaacctgcctaatcttcttgtggatccagaatttgcaaaagaaattattgagagacaatctgcttggagaagagttgtatccattgctatcaactctggtatcagcacccctggtatgtcttctagccttgcgtattttgacacatacaggaggtccaggctgcctgctaatttagtccaagctcaacgagattattttggagcacatacatatgagaggattgatatagatggatccttccatactgagtggtttaaaattgctaaacagtcaaagatctaa

SEQ ID NO: 356 - protein, 485 aa, Populus trichocarpa
MAPLTRIGLAGLAVMGQNLALNIAEKGFPISVYNRTTLKVDETVERAKQEGDLPLYGFHDPESFVKSIQKPRVIIILVKAGAPVDQTIKTLSVYMEKGDCIIDGGNEWYENTERREKALAELGLLYLGMGVSGGEDGARHGPSLMPGGSFEAYKHIEDILLKVAAQVPDSGPCVTYIGKGGSGNFVKMVHNGIEYGDMQLIAEAYDVLKSVGKLTNEELCQVFSEWNKGELLSFLIEITADIFGIKDDKGEGYLVDKVLDKTGMKGTGKWTVQQAAELSVAAPTIASSLDGRFLSGLKEERVEAAKVFKSSGIIDMLADQVVDKEKLIYDVRQALYVSKICSYAQGMNLIRAKSAEKGWDLKLGQLTRIWKGGCIIRAVFLDRIKKAYDRNPNLPNLLVDPEFAKEIIERQSAWRRVVSIAINSGISTPGMSSSLAYFDTYRRSRLPANLVQAQRDYFGAHTYERIDIDGSFHTEWFKIAKQSKI

SEQ ID NO: 357 - DNA, 1479 bp, Populus trichocarpa
atggacgcctctactctttcacgcataggcctagcaggtctagccgtgatgggtcaaaacttagccctaaacattgccgaaaaaggttttccaatctcagtctataaccgaacaacttccaaagtcgacgaaactcttatccgtgctcaatccgaaggcccattctccctaactggtcactactctcctcgtgattttgttctctcaatccaaaggcctagatccatcatcatcttggtcaaagctggaaacccagttgaccaaacgatctctgctctgaccgagttcatggagcctggtgacactatcatcgatggtgggaatgagtggtaccagaatactgagaggagaattcaacaggtggcagataaagggattctttatttgggcatgggggtttccggtggcgaagaaggtgcaagacacgggccttcgttgatgcctggtggttcttttgaggcgtataagaatattgagtctgtcttgaagagtgttgcagctcaagttgatgacggtccttgtgttacttatattggcgaagggggttctggaaattttgttaaaatggttcataatgggattgagtatggagatatgcagttgatatcggaagcttatgatgttttgaagaatgttggtgggctttcgaatagcgaactggcggaaatttttggggagtggaatagaggggagttggagagtttcttgattgagattacgagtgatatttttaaggtcaaggataatttggttgatggggatttggttgataagatattggataagactggaatgaaagggacagggaaatggactgttcagcaagctgctgaattgtctgttgctgcaccgacgattgctgcttcgttggattgtagatatttgagtggtttgaaagaggagagggagagtgcggcggagattttgaaggaagctgggttggaggaggaagtggggagtgttaagagtggggttgataagaagaggttgattgatgatgtgaggaaagcattgtatgcatccaagatttgtagttatgctcaagggatgaacttgttgagggctaagagtgttgagaaaggttgggatttggattttggtgagctagctaggatttggaaaggtgggtgcattattagggctgtgtttttggataggattaaaaaggcttaccagaggaatcctaacttggcaagtttagttgtcgacccggagtttgccagggagatggtgcagaggcaggcggcttggaggagagttgtggggttggcgatttcagctggaattagcactccgggaatgtgtgccagtcttgcttattttgatacttataggcgtgctaggctgccagcaaatcttgttcaggctcagagagacttgtttggggcccatacttatgagaggactgatcgtccaggggcatttcatactgagtggacaaaacttgctcgcaagagcagtgctggtgctttcagttaa

SEQ ID NO: 358 - protein, 492 aa, Populus trichocarpa
MDASTLSRIGLAGLAVMGQNLALNIAEKGFPISVYNRTTSKVDETLIRAQSEGPFSLTGHYSPRDFVLSIQRPRSIIILVKAGNPVDQTISALTEFMEPGDTIIDGGNEWYQNTERRIQQVADKGILYLGMGVSGGEEGARHGPSLMPGGSFEAYKNIESVLKSVAAQVDDGPCVTYIGEGGSGNFVKMVHNGIEYGDMQLISEAYDVLKNVGGLSNSELAEIFGEWNRGELESFLIEITSDIFKVKDNLVDGDLVDKILDKTGMKGTGKWTVQQAAELSVAAPTIAASLDCRYLSGLKEERESAAEILKEAGLEEEVGSVKSGVDKKRLIDDVRKALYASKICSYAQGMNLLRAKSVEKGWDLDFGELARIWKGGCIIRAVFLDRIKKAYQRNPNLASLVVDPEFAREMVQRQAAWRRVVGLAISAGISTPGMCASLAYFDTYRRARLPANLVQAQRDLFGAHTYERTDRPGAFHTEWTKLARKSSAGAFS

SEQ ID NO: 359 - DNA, 2061 bp, Populus trichocarpa
gaaaggcaacggtcacatttagaccacctcccagttcttacctaccaatgccaagtaccaaccaaaatagaatactattttggtggccaaatttgacccgcttataaatccggacaaacgaagagatcatcaccaattgttattgtttccttctaactagtccctttcttcctgactgatctgtgcactatctttgattttcctgggttttcctttgtttctccagaatccatttccaagggtaactatggctgcacctcccaagccaacaagaataggccttgctggtctggctgtcatgggccagaatctggcccttaatatcgcagagaaaggtttccccatttctgtttataatcggactacctccaaagttgatgagactgttgtgagggctaaaaaagagggagatcttcccttatatggcttccatgatcctgaatcttttgtgaagtcaatccaaaagcctcgagtggtaattatgcttgttaaggcagggtcacctgttgaccaaaccataaagactctttctgcctacttggagaagggtgattgtatcattgatggtggaaatgagtggtatgagaacactgagaggagagaaaaggctatggctgaactgggcttgctctaccttggaatgggagtttcaggtggtgaagagggtgcacgtaatgggccttctatgatgcctggaggttcctttgaggctttcaagtacattgaagacattctgcttaaagtagcagctcaagttcctgatagtggcccctgtgtgacttacattggcaaaggtggttctggtaattttgtcaagatggttcataatggaattgaatatggtgatatgcagttgattgctgaagcatatgatgtactaaaatcagttggaaagttgtcgaatgatgaactccgtagtgttttttcagaatggaacaagggtgagcttctgagcttcttggttgaaatcactgcagatatatttggaattaaagatgataagggagaaggatattttgttgacaaggttttggacaaaactggcatgaagggtaccggtaagtggaccgtgcagcaagctgctgatctatcagttgcagctcctacaattgcctcttctttggatgcaaggttcctaagtggtttaaaggaggaacgagttgaagctgctaaagtcttcaaagcaggtggctttggggatattttgactgatcaagtggtggataagaagcagttgatcgatgatgtcaggcaagctctttatgcatccaagatttgtagctatgcacaggggatgaatttgatccgtgcaaagagtatggagaagggatgggacttggaattgggagaactggctaggatttggaagggtggttgtattattcgagcagtatttctggacagaatcaagaaggcatatgataggaatcctgatcttgccaaccttctagtggatccagagtttgcaaaggaaatcattgagcgccagtcagcctggcgcagggttgtatgtcttgcaatcaactcaggtattagcactcctggtatgtcatccagtctggcttattttgacactttccgaagggaaaggttgccagctaatttggtccaagctcaacgagattattttggtgctcatacatatgaaagggttgatgtggaaggatctttccatactgaatggttcaagattgcaaggcagttgaagaattaaaccttttcctggtgctatcaagcttaattaagactttcaataagacaataacttctgctctggactctattctgggtagaacttacatcacccctatttcatgaaatttatctcaatcaggttcatcaaatccaattgagtacttagactttgtctcacttttatatgttgtggtttttcttggcagttctgcttttgtattttattttcaccggactcctcatccaggattgtagccccatttctttttaaagagatatttaatggtgcttttgagtagtagtatgaaatcagatgtttgaacaataaattttctcttttggtgttattttctttatttgctcttc

SEQ ID NO: 360 - protein, 488 aa, Populus trichocarpa
MAAPPKPTRIGLAGLAVMGQNLALNIAEKGFPISVYNRTTSKVDETVVRAKKEGDLPLYGFHDPESFVKSIQKPRVVIMLVKAGSPVDQTIKTLSAYLEKGDCIIDGGNEWYENTERREKAMAELGLLYLGMGVSGGEEGARNGPSMMPGGSFEAFKYIEDILLKVAAQVPDSGPCVTYIGKGGSGNFVKMVHNGIEYGDMQLIAEAYDVLKSVGKLSNDELRSVFSEWNKGELLSFLVEITADIFGIKDDKGEGYFVDKVLDKTGMKGTGKWTVQQAADLSVAAPTIASSLDARFLSGLKEERVEAAKVFKAGGFGDILTDQVVDKKQLIDDVRQALYASKICSYAQGMNLIRAKSMEKGWDLELGELARIWKGGCIIRAVFLDRIKKAYDRNPDLANLLVDPEFAKEIIERQSAWRRVVCLAINSGISTPGMSSSLAYFDTFRRERLPANLVQAQRDYFGAHTYERVDVEGSFHTEWFKIARQLKN

SEQ ID NO: 361 - DNA, 1518 bp, Phaeodactylum tricornutum
atgccagtatcacaaaccgttcctcaaatttcaattccagatgacgaactttgtgacattggaatctttggtcagtctgtgatgggagcaaatcttagtcttaatatcgccgagagtggatttcgtgttgttgtgggcaatcgtactcagaagaaggttgaggcgacggtacagcgtgccaaggacgaaggaaacttgccgcttgttggctccgatggtcctgagcattttgtttcgcagttaaaaaagcctcgcaaggtcatcatccttgtacaagcgggaacggctgtcgatgatacaatatcgtcacttgcaaagtacttggagcctggagacatcttaattgacggaggcaacgagtggttccctaacagtattcgtcgtggagagtttctggagccgaagaacatccattttctcggaatgggcattagtggaggagaagaaggagcacgcaaaggtccatctttaatgccgggcggaccgaaagatgcgtacgatcttgtcgaacccatcttgtcaaaatgcgctgcttacgtcgatgaggccggatcatgcgttggctacgtaggcccaattggagcagggaactacgtcaagatggttcataacggcattgaatacggagacatgcaattaatcgcggaagtctatgacacgatgaaaagtacgctgggtatgtccaatttggaaatagccgatgtcttcgacgaatggaataaaagtgaattggaatcttatttgatcgaaatcaccgccacgattctccgcaaaaaggatgatgagactggttgtgggtacgtaatcgattatattttggacaaaactggcatgaagggcactggaaggtggaccattcaggaaggagctgaaagaggtgttgcaatttctactttggctgccgctctcgacgctcgaatgctgagcggattgaaggaggaacgagaagtggcgtccaaggtacttgatgagccatcaatgcagagtacagataagacacaggtagttgcggatctacgagcagcactgtacgcgtcgaaagtttgttcatacgcccaaggattgagtttgatcaaagcagcttccgatgagtatcagtgggacgtggacctttcggaatgtgcccgcttgtggatgggaggatgcatcattcgagcaaagttgttggggtcaattcgagaagcttattcgaaaaattccaatttgtcgaatttgcttgttgatgccggcttcgcgtcggctttgaatgagcgctcagttgcctggagaagacttatcgctctctgtgtaacgagcggtgtcacgtgttcggctctctgcaattcgttaagttactttgatacgtacagacgagctcgcctcccggccaacttaactcaggctcagcgggattttttcggagggcacacatatgagcgtacagataaagatggtcgttttcataccgcgtggacggacgctcacaaagacataggcgatgccagtcaacgaacaagcggagaaaatgttcaaatttaa

SEQ ID NO: 362 - protein, 505 aa, Phaeodactylum tricornutum
MPVSQTVPQISIPDDELCDIGIFGQSVMGANLSLNIAESGFRVVVGNRTQKKVEATVQRAKDEGNLPLVGSDGPEHFVSQLKKPRKVIILVQAGTAVDDTISSLAKYLEPGDILIDGGNEWFPNSIRRGEFLEPKNIHFLGMGISGGEEGARKGPSLMPGGPKDAYDLVEPILSKCAAYVDEAGSCVGYVGPIGAGNYVKMVHNGIEYGDMQLIAEVYDTMKSTLGMSNLEIADVFDEWNKSELESYLIEITATILRKKDDETGCGYVIDYILDKTGMKGTGRWTIQEGAERGVAISTLAAALDARMLSGLKEEREVASKVLDEPSMQSTDKTQVVADLRAALYASKVCSYAQGLSLIKAASDEYQWDVDLSECARLWMGGCIIRAKLLGSIREAYSKNSNLSNLLVDAGFASALNERSVAWRRLIALCVTSGVTCSALCNSLSYFDTYRRARLPANLTQAQRDFFGGHTYERTDKDGRFHTAWTDAHKDIGDASQRTSGENVQI

SEQ ID NO: 363 - DNA, 1667 bp, Phaeodactylum tricornutum
cataaaacggccatcgcaactgctgttcacgagaactgttgcaatcgcgaagcaatcgcaaaagaatctattcaaacactttccaccaacgagataaacaggatgagctgcgatattggtctttacggtcttgctgtcatgggacagaattttgcgctcaatatggcgtcgcacgggttcaccgttgccgtttgcaaccgctcgccctccaaagtcgatacgacggtccaacgcgccaaggacgaaggcgatttgcccttgatcggtaccaaatctcccgaagaatttatttccaaactcagcaagcctcggaaagtcgtcattctcgtccaagccggaaaacctgtcgatttgaccatcgaagcgatcagcgaattcatggaagaaggggatgtcattattgacggaggcaacgaatggttcccgaatcagattcgtcgtcacgaagaattggaaaagaagggtatcatgttcatcggcatgggaatttctggtggcgaagaaggagcccgcaacggaccttctctcatgcctggcggtccccgaaaggcgtacgacttgattgaacccatcatcatgaagtgtgccgccaaggctggggatccggaagaaccctgcacgggttattgcggaccaatcggagcgggcaattacgtcaaaatggtgcacaacggtatcgaatacggcgacatgcagttgattggagaggtctacgatattctaaagaatattgtcggtatgggcaacgatgaaatggccacactctttgaagactggaactctggtgatctcgagtcgtacctcattgaaatcacggccaagattttggctcgcaaggacgatttgaccgacgacggatacgtggtggacaagattcttgacaagacaggaatgaaaggtactggccgttggacggtacaagaagctgccgaacagagtgttgcagcccctctcattgcagcttccctcgatagtcgctacatttccggccgcaaggaagaacgtgtcgctgccagcaaagtcctccagggaccatccaacgaaatgccgcaagtcgacaaggatcaaatcttgtcggatctgcagcaagcgttgtactgcgccaaggtaacttcgtatgcgcagggaatgggaatcatccaggccgcgtccgacaagaacgagtgggacgtcgacctctccctctgtgccaaaatgtggcgtggaggctgcatcattcgcgcgagcttgttgagcaagatcacggccgcctttgaaaagaacaaggacttgcagaatttgttggtggacgaaacgtttgctgaagaaatcaacgcaaggcagatggcttggcgccgcgtggtttctttgggcgtcgctagcggtatcgctaccccggccttgtccgctgctctttcctactttgaccagtaccgtcgtgatcgcttgccggccaacctgattcaagcgcagcgcgatttctttggcggacacacttacaatcgtgtcgatcgtgatggcacttttcattgcttgtgggacgaaacgcacaaggatattggtgatttgacgggccgcaccgcgggtgagctctagacgccacggatcccgagtcgcgttaacgtatatcaaatctaagtattggtaaatcacaaacttcgtcagcaatagcgagtcattttaatatc

SEQ ID NO: 364 - protein, 490 aa, Phaeodactylum tricornutum
MSCDIGLYGLAVMGQNFALNMASHGFTVAVCNRSPSKVDTTVQRAKDEGDLPLIGTKSPEEFISKLSKPRKVVILVQAGKPVDLTIEAISEFMEEGDVIIDGGNEWFPNQIRRHEELEKKGIMFIGMGISGGEEGARNGPSLMPGGPRKAYDLIEPIIMKCAAKAGDPEEPCTGYCGPIGAGNYVKMVHNGIEYGDMQLIGEVYDILKNIVGMGNDEMATLFEDWNSGDLESYLIEITAKILARKDDLTDDGYVVDKILDKTGMKGTGRWTVQEAAEQSVAAPLIAASLDSRYISGRKEERVAASKVLQGPSNEMPQVDKDQILSDLQQALYCAKVTSYAQGMGIIQAASDKNEWDVDLSLCAKMWRGGCIIRASLLSKITAAFEKNKDLQNLLVDETFAEEINARQMAWRRVVSLGVASGIATPALSAALSYFDQYRRDRLPANLIQAQRDFFGGHTYNRVDRDGTFHCLWDETHKDIGDLTGRTAGEL

SEQ ID NO: 365 - DNA, 1700 bp, Phaseolus vulgaris
ttttgctgtgattcggttgaaatttcaggaggacaattatggctctacccacaacgagaataggcctggctggactggctgttatgggccaaaatctagcactcaatattgctgagaaaggctttcctatttctgtttataaccgaactacatccaaggttgatgagactgtagaacgagcaaaactagaaggaaatcttccagtttatggctaccatgatcctaaagcttttgttctttccattcgaaagcctagggtggtaataatgcttgttaaggctggggcacctgttgaccaaaccattaagaccctgtctgccttcatggaaaaaggtgactgtataattgatggtggtaatgaatggtatgagaacactgaaagaagagaggaagcaatgtctgaattgggttttctctaccttggtatgggagtttctgggggtgaggaaggtgctcgtaatggtccctctttgatgcctggtggttcgtttgaagctttcaaaaacatagaagatattcttctcaaggtggcagctcaagtccctgatagtggtccttgcgtgacatatattggtaaaggtggttctggtaattttgtgaagatgattcacaatggtatagaatatggtgatatgcagctgattgcagaggcttatgatgtgctgaagtcagttggaaagttgtcaaatgaggaactacaaagtgtcttctcagaatggaacaaaggagaacttcttagtttcctgattgaaatcaccgcagatatatttggaattaaggatgataaaggagaaggatatcttgttgacaaggttctagacaagactggcatgaagggtactggtaagtggactgttcagcaagctgctgaattatcagttgctgctcccactattgaagcatcattggatgcaaaggttctgagtggcttgaaggaggaaagagtagaagctgcaaaagtctttaaatcaggtgatattgtgactgatcaacctgtagacaagcagcagttgattgatgatgttaggaaggctctttatgcagccaaaatctgtagttatgcacagggaatgaatctgatccgtgcaaagagtatcgaaaagggatgggatttgcagttgggtgaactggcccgaatttggaaagggggttgcatcattagagctatattcttagacagaattaagcaggcatatgatagaaaccctagtctggcaaaccttcttgttgatccagagtttgcgaaggaaatactcgatcgccaatctgcctggaggagagttgtttgccttgctgtcaattctagaatcagcactccaggtatgtctgctagccttaattattttgacagttacagcagggaaagttcgcctgctaatttggtgcaagctcagcgtgactactttggtgctcatacatatgaaagggttgacatagagggctcttaccatactgagtggttcaagcttgccaaacagtcaagaatttagatcactttctttgagcccatcaggatttcaaataaatgtaatgttttctgctcagactgtgtgctgagttgagtttacatagccactatgtggtgaagtgttattatattgtttccaactgaattgcttgatgttccattctccaaaaaaaatgttgtatctttgcggatagtgttttgtgcttgatacaaaattggccccagttcgtgc

SEQ ID NO: 366 - protein, 483 aa, Phaseolus vulgaris
MALPTTRIGLAGLAVMGQNLALNIAEKGFPISVYNRTTSKVDETVERAKLEGNLPVYGYHDPKAFVLSIRKPRVVIMLVKAGAPVDQTIKTLSAFMEKGDCIIDGGNEWYENTERREEAMSELGFLYLGMGVSGGEEGARNGPSLMPGGSFEAFKNIEDILLKVAAQVPDSGPCVTYIGKGGSGNFVKMIHNGIEYGDMQLIAEAYDVLKSVGKLSNEELQSVFSEWNKGELLSFLIEITADIFGIKDDKGEGYLVDKVLDKTGMKGTGKWTVQQAAELSVAAPTIEASLDAKVLSGLKEERVEAAKVFKSGDIVTDQPVDKQQLIDDVRKALYAAKICSYAQGMNLIRAKSIEKGWDLQLGELARIWKGGCIIRAIFLDRIKQAYDRNPSLANLLVDPEFAKEILDRQSAWRRVVCLAVNSRISTPGMSASLNYFDSYSRESSPANLVQAQRDYFGAHTYERVDIEGSYHTEWFKLAKQSRI

SEQ ID NO: 367 - DNA, 1959 bp, Sorghum bicolor
gcacgaggcccgatcgattggagatagatatttaagccggggtggggagggagggaaggtggcgagtgaaagggaggtaggtggacggtggtggtggcatcgccaattcaactccgcatctgatctgcatccgcatcggcaccagcgcgattcacaccgcccagcgaccaggcgggagaggaggcagcaccagagtgtaggagatggcgctcacaagaattggtcttgctggccttgcggtcatggggcagaaccttgccctcaacattgcagagaaaggcttccccatctctgtctacaacaggacaacctccaaggttgatgagaccgtgcagcgtgccaaggcagaaggaaaccttcctgtgtacggcttccatgaccctgcatcctttgtgaactccattcagaagccgcgtgttgtcatcatgcttgtcaaggctggtgcaccagttgaccagaccattgcgacgctcgcagctcacttggagcagggtgactgtatcattgatggagggaatgagtggtatgagaacactgagaggagggagaaggccatggaggagcgtggcctcctctatcttggaatgggcgtctctggaggagaggagggtgcccgcaacggaccatccttgatgcctggaggctcatttgaggcttacaagtacattgaagacattgttctcaaggtggctgctcaggtccctgacagtggcccatgtgtcacgtatattggcaaaggtggatcaggcaactttgtcaagatggttcacaatggtattgagtatggtgatatgcagctgatttcggaggcatatgatgtgctcaagtcagtcggtaagctcaccaacagtgagctgcaccaggtgttctccgaatggaacaagggtgagctccttagtttcttgattgagatcacggctgacatatttggcatcaaggacgagcagggtgagggctacttggttgacaaagtcctggacaagaccgggatgaaaggaacagggaaatggacagtgcagcaggctgctgagctatctgtggctgctcctacaattgaggcatccttggactccaggttcctgagcggactgaaggatgagcgggtcgaggcttccaaaatcttccaaggggactactccactggcctaccagtcgacaaggcacagctgatcgaagatgtgaggcaggccctctatgcctccaagatctgcagctacgcacagggcatgaacatcatcaaggctaagagctcagagaaaggatggggtctcaaccttggcgagctagccaggatctggaagggtgggtgcatcatccgcgccatcttcctcgaccgcatcaagaaggcctatgataggaactctaacctcgccaacctcctcgtggaccctgagtttgcacaggagatcatggacaggcaagcggcatggcgtagggtggtctgccttgccatcaacaatggcgtcagcaccccaggcatgtccgctagcctggcctacttcgactcgtaccggagggacaggctgcctgccaacctggtgcaggcccagagggactacttcggggctcacacctacgagagggttgacatgcctggcgctttccacaccgagtggttcaagattgcgcgcaacatctccaagaactgagctgctccagatgggcatgccatggcagcacattgacatggttctcctattttcgtcatcttttattgctgctcagtgttgagcaatcggtaatgtactactttgtagggggaggtactgtggttaaatttgatttttcgcgctcagtgcttaatttgggtcaggaagttgaatttgtctctgttcttcccttgtaagcggttggaatggagaacaatgatgtttcttggaacttctccatttgatctttgtaagttcgttatcagaataaataaaagcattctgacatgcttctgcttgtccaaaaaaa

SEQ ID NO: 368 - protein, 481 aa, Sorghum bicolor
MALTRIGLAGLAVMGQNLALNIAEKGFPISVYNRTTSKVDETVQRAKAEGNLPVYGFHDPASFVNSIQKPRVVIMLVKAGAPVDQTIATLAAHLEQGDCIIDGGNEWYENTERREKAMEERGLLYLGMGVSGGEEGARNGPSLMPGGSFEAYKYIEDIVLKVAAQVPDSGPCVTYIGKGGSGNFVKMVHNGIEYGDMQLISEAYDVLKSVGKLTNSELHQVFSEWNKGELLSFLIEITADIFGIKDEQGEGYLVDKVLDKTGMKGTGKWTVQQAAELSVAAPTIEASLDSRFLSGLKDERVEASKIFQGDYSTGLPVDKAQLIEDVRQALYASKICSYAQGMNIIKAKSSEKGWGLNLGELARIWKGGCIIRAIFLDRIKKAYDRNSNLANLLVDPEFAQEIMDRQAAWRRVVCLAINNGVSTPGMSASLAYFDSYRRDRLPANLVQAQRDYFGAHTYERVDMPGAFHTEWFKIARNISKN

SEQ ID NO: 369 - DNA, 1479 bp, Saccharomyces cerevisiae
atgtcaaaggcagtaggtgatttaggcttagttggtttagccgtgatgggtcaaaatttgatcttaaacgcagcggatcacggatttaccgtggttgcttataataggacgcaatcaaaggtagataggtttctagctaatgaggcaaaaggaaaatcaataattggtgcaacttcaattgaggacttggttgcgaaactaaagaaacctagaaagattatgcttttaatcaaagccggtgctccggtcgacactttaataaaggaacttgtaccacatcttgataaaggcgacattattatcgacggtggtaactcacatttcccggacactaacagacgctacgaagagctaacaaagcaaggaattctttttgtgggctctggtgtctcaggcggtgaagatggtgcacgttttggtccatctttaatgcctggtgggtcagcagaagcatggccgcacatcaagaacatctttcaatctattgccgccaaatcaaacggtgagccatgctgcgaatgggtggggcctgccggttctggtcactatgtgaagatggtacacaacggtatcgagtacggtgatatgcagttgatttgcgaggcttacgatatcatgaaacgaattggccggtttacggataaagagatcagtgaagtatttgacaagtggaacactggagttttggattctttcttgattgaaatcacgagggacattttaaaattcgatgacgtcgacggtaagccattggtggaaaaaattatggatactgccggtcaaaagggtactggtaaatggactgcaatcaacgccttggatttaggaatgccagtcactttaattggggaggctgttttcgctcgttgtttgtcagccataaaggacgaacgtaaaagagcttcgaaacttctggcaggaccaacagtaccaaaggatgcaatacatgatagagaacaatttgtgtatgatttggaacaagcattatacgcttcaaagattatttcatatgctcaaggtttcatgctgatccgcgaagctgccagatcatacggctggaaattaaacaacccagctattgctctaatgtggagaggtggctgtataatcagatctgtgttcttagctgagattacgaaggcttatagggacgatccagatttggaaaatttattattcaacgagttcttcgcttctgcagttactaaggcccaatccggttggagaagaactattgcccttgctgctacttacggtattccaactccagctttctctactgctttagcgttttacgacggctatagatctgagaggctaccagcaaacttgttacaagcgcaacgtgattattttggcgctcatacatttagaattttacctgaatgtgcttctgcccatttgccagtagacaaggatattcatatcaattggactgggcacggaggtaatatatcttcctcaacctaccaagcttaa

SEQ ID NO: 370 - protein, 492 aa, Saccharomyces cerevisiae
MSKAVGDLGLVGLAVMGQNLILNAADHGFTVVAYNRTQSKVDRFLANEAKGKSIIGATSIEDLVAKLKKPRKIMLLIKAGAPVDTLIKELVPHLDKGDIIIDGGNSHFPDTNRRYEELTKQGILFVGSGVSGGEDGARFGPSLMPGGSAEAWPHIKNIFQSIAAKSNGEPCCEWVGPAGSGHYVKMVHNGIEYGDMQLICEAYDIMKRIGRFTDKEISEVFDKWNTGVLDSFLIEITRDILKFDDVDGKPLVEKIMDTAGQKGTGKWTAINALDLGMPVTLIGEAVFARCLSAIKDERKRASKLLAGPTVPKDAIHDREQFVYDLEQALYASKIISYAQGFMLIREAARSYGWKLNNPAIALMWRGGCIIRSVFLAEITKAYRDDPDLENLLFNEFFASAVTKAQSGWRRTIALAATYGIPTPAFSTALAFYDGYRSERLPANLLQAQRDYFGAHTFRILPECASAHLPVDKDIHINWTGHGGNISSSTYQA

SEQ ID NO: 371 - DNA, 1932 bp, Solanum lycopersicum
ggaaaagttaggctaacatcgactaagacgccaacctctcgttggttgttttggccactaccctttcactccctcgacgagtccgtcactctcctattacctaaaaacccaccaaacatttctcatttttcactatatattcatcttcttcactccattttcaaggaatctcttccatttttttcctcctgaaaatcactttttcttcattcaccatggaaggcgcagcaacagctcaagctttatctcgtattgggttagctggcttagctgttatgggtcagaatttggccttaaacatagctgaaaaagggtttcctatatctgtttacaatagaaccacttcgaaagtagatgaaaccctagatcgtgctcagaatgaaggacagcttccattgattggacagtacaatcctcgtgatttcgtgttgtctattcaacgacccagatctgttatcattcttgttaaagcggggtcacctgttgatcaaacgattgctgcgctttctgagtatatggagcctggggatacgattattgatgggggtaatgagtggtatgagaatactgaaaggaggattgatgaggcgtcgtctaaggggcttttgtatttgggtatgggtgtttctggtggagaagaaggggcgaggaatggaccttcgcttatgcctggtgggtcttatggggcttatacgaatatcaaagatattcttgagaaggttgcagctcaagttgaggatgggccttgtgttacttatattggtgaaggtgggtcggggaattttgtgaaaatggtgcataatggaattgaatatggtgatatgcagttgatttcggaagcttatgatgtgttgaagaatgcgggtgggttgagtaattctgaattggctgatattttcgccgaatggaaccgtggggaattggagagctttttgattgaaattacagcggatatattcaatgtgaaggatgaattgactggaaatggggagttagtggacaagattttggataagacaggaatgaaggggacggggaaatggactgtgcagcaggcggcggagctgtctattgcagctccgacaattgctgcttcgttagacagtaggtacatgagtggattgaaggatgagagggtagaagcctcagagatttttaggaaggaaggtttaaaggaggaaataagttctgatattaatggtattagcagtgttgataagaagagattgattgatgatgtgaggcaggcattgtatgcgtcgaaaatctgtagttatgctcaggggatgaatttgctaagggcaaagagctctgagaaaggttggaatttgaatttgggagagatggctaggatttggaaaggtggttgtattatcagggcagtgtttttggatcgtattaagaaggcgtatcagaggaatcctaatttggctaacttgatggttgacacggagttcgcaagggagatggtgcagaggcaagctgcttggaggagagtggtgggacttgctgttcagaagggaattagtgttcctggaatgtctgctagtcttcagtatttcgacacctacaggcgttctaggcttcccgcgaaccttgtgcaggctcagagggactatttcggggcacatacttatgagagagttgacaagccaggagcataccataccgagtgggcaaaacttgctaggaaagctcgagtgtaatgctgctgcagctattgcggattatgatcaaaatctctggtattagtcgcgctttagtacttttttcgtttagttttgcagttaataatgttgtatgcctttgaacattatagggccttcgctatcgaaatgacttcttccattgaagtaaaagaagttgcttttcctacattacattttgatgcatacaaattacctgcacttttatttatatatatggattatc

SEQ ID NO: 372 - protein, 496 aa, Solanum lycopersicum
MEGAATAQALSRIGLAGLAVMGQNLALNIAEKGFPISVYNRTTSKVDETLDRAQNEGQLPLIGQYNPRDFVLSIQRPRSVIILVKAGSPVDQTIAALSEYMEPGDTIIDGGNEWYENTERRIDEASSKGLLYLGMGVSGGEEGARNGPSLMPGGSYGAYTNIKDILEKVAAQVEDGPCVTYIGEGGSGNFVKMVHNGIEYGDMQLISEAYDVLKNAGGLSNSELADIFAEWNRGELESFLIEITADIFNVKDELTGNGELVDKILDKTGMKGTGKWTVQQAAELSIAAPTIAASLDSRYMSGLKDERVEASEIFRKEGLKEEISSDINGISSVDKKRLIDDVRQALYASKICSYAQGMNLLRAKSSEKGWNLNLGEMARIWKGGCIIRAVFLDRIKKAYQRNPNLANLMVDTEFAREMVQRQAAWRRVVGLAVQKGISVPGMSASLQYFDTYRRSRLPANLVQAQRDYFGAHTYERVDKPGAYHTEWAKLARKARV

SEQ ID NO: 373 - DNA, 2054 bp, Spinacia oleracea
gcacgagcaaaaaccctccgcaaaccccccatttccctccctcctcgttgcagcacgacagtcgacaccatctctttctctctcctccttcaacaatggcggctgttcgctctgcaattctgaaatacatgagggtgccagtagcccaaaacacttactctccatcttcgatttcatcttccatcaactccttcttctctcgccgcaacttttccgatgaggtccgaggttccttcctcgacgagtccgtcctttctctctcctccatttatacatcttccccttctttctctctcctcaccaactccccttccacactcttcctcctccactttctctctcttctcaacaatggcggcttctcaaatcggtctcgtcggcctcgccgtaatgggccaaaacctcgccctcaacatcgccgagaaaggcttccctatttccgtctacaatcgcacagcctccaaggtcgatgaaaccctagaccgcgccaagtcagaaggcgatctcccgctctctggccactacactcctcgcgatttcgtcctctccatagaacgccccagatccatcgttatcctcgtcaaagccggctcccccgttgatcaaactatcgcttctcttgcctcctttatggaacctggtgacactatcatcgacggaggtaacgagtggtaccaaaacacagagcgtcgtttatctgacgctcactccaacggcctcctctacctcggtatgggcgtctctggtggcgaagaaggcgctcgttttggcccctcgctcatgcccggcggagatttccaggcgtacgacaatatccaacacattttgaagaaggttgctgctcaagtcgatgatgggccttgtgttacatacatcggagaaggtgggtccgggaatttcgtgaagatggtgcacaatgggattgagtatggtgatatgcagctgatttcggaggcttatgatgtgttgaagaatgtgggtggattgagcaatgaggaattgggtcagatttttgatgagtggaataagagtgagcttgagagctttttggttgagattactgcggatatctttaaggtgaaggatgatttagcggatggaggtttggttgataagattttggataagactgggatgaaaggtactggcaaatggactgttcaacaagctgctgaactctctgttgctgctcctaccattgctgcttctttggattgcaggtatctaagtgggttgaaagaggagagagaaaatgcagccaagatattggaagctgcagggatgaaggaagaggttaatgcgattagaggtggggttgataagaagaggttgattgatgatgtgaggcaagcgttgtatgcttcaaagatctgtagttatgctcaagggatgaatttattgagggcgaagagtgctgagatgggttgggatttgaatttaggggagttggcgaggatttggaaaggtgggtgtattattagggcagttttcttggacagcattaagcaggcatatcagaggaaccccaacttagctagtttggtggttgatcctgagtttgctaaggagatggtacagaggcaagcagcttggagaagggttgtgggtttggcagtctctgctgggataagtacacctggaatgtgcgccagtcttgcttatttcgatacttacaggcgtgccagacttccagctaaccttgttcaagctcagagggactactttggcgctcatacctatgagagggttgatctccctggctcttaccacactgagtggtcgaagcttgctcgtaagagtgaccccaatgttgctgctgccctccactgagctacgcctttttcccttcccctgtgttttcttaccatgtatttctgttgtttccaattgaaattgggattttgtgcctccaacaatgatccctttttaggcataggaattgttacagtattgttttagctcattagaaatggtagcgggaactgatgttaataagagcatgtctttcggaatatcaatacaaagaggtgttgtgtgaactaaatctcgtgccg

SEQ ID NO: 374 - protein, 537 aa, Spinacia oleracea
MRSEVPSSTSPSFLSPPFIHLPLLSLSSPTPLPHSSSSTFSLFSTMAASQIGLVGLAVMGQNLALNIAEKGFPISVYNRTASKVDETLDRAKSEGDLPLSGHYTPRDFVLSIERPRSIVILVKAGSPVDQTIASLASFMEPGDTIIDGGNEWYQNTERRLSDAHSNGLLYLGMGVSGGEEGARFGPSLMPGGDFQAYDNIQHILKKVAAQVDDGPCVTYIGEGGSGNFVKMVHNGIEYGDMQLISEAYDVLKNVGGLSNEELGQIFDEWNKSELESFLVEITADIFKVKDDLADGGLVDKILDKTGMKGTGKWTVQQAAELSVAAPTIAASLDCRYLSGLKEERENAAKILEAAGMKEEVNAIRGGVDKKRLIDDVRQALYASKICSYAQGMNLLRAKSAEMGWDLNLGELARIWKGGCIIRAVFLDSIKQAYQRNPNLASLVVDPEFAKEMVQRQAAWRRVVGLAVSAGISTPGMCASLAYFDTYRRARLPANLVQAQRDYFGAHTYERVDLPGSYHTEWSKLARKSDPNVAAALH

SEQ ID NO: 375 - DNA, 1643 bp, Spinacia oleracea
ggcacgagattgaacccacatcgttaaattttctgggttttcatttgatttctgatcaaccaattttccgagcaggaataagcaatggctcctcctacaaggattggtcttgctggtctggctgtgatgggtcaaaatcttgcactaaacattgctgaaaaaggattccccatttctgtttacaaccgtacaacctcaaaggttgatgagaccgttgaacgagctaaacaagaaggaaatcttcctctgtatgggtttcatgaccctgaatcctttgtgaattcaatccagaaaccccgtgtcataatcatgcttgttaaggctggggctccagttgatgcaaccatcaaaactttgtctgcctatttggagaaaggagactgcatcatcgatggtggcaatgagtggtatgagaataccgagaggagagagaaagcaatggaggaaaagggactgctctacctcggaatgggagtttcaggaggtgaagagggtgcaagaaatggaccctctatgatgcctggtggttcattcgatgcttacaaaaacatcgaggatattctaaccaaggttgccgcacaggttgatagtggcccttgtgtaacctatattggcaaaggaggttctggcaattttgttaaaatgattcacaacggaattgaatatggtgacatgcagttgattgcagaggcttatgatgtgctgaaatcagttggaaagctctctaatgaagagttgaaggaagtttttgcagagtggaacagaggagagcttcttagcttcttgattgaaatcacagcagatatttttggaattaaggatgacaaaggtgaaggatatttggtagacaaagtgttggataaaaccggtatgaagggtacaggaaaatggacagttcaacaagctgctgagttatctgttgctgcccctaccattgcatcatctttggactcgagatttctgagcggtctaaaagatgaaagagttgaagctgccaaggtgttcaaagctggaggggttgaggatacactctctgaccaagttgttgataaaaagaaattgatagatgatgttagacaagccctttatgctgcgaaaatatgtagctatgcacaaggaatgaacttgattcgtgcaaaaagtgttgagaaagagtgggatttgaaactcggggagctagctaggatctggaagggtggatgcatcatccgtgctatgtttctggaccggattaagaaggcttatgacaggaacccaaacctctcaaacctacttattgacccagaattttcaaaggagatgattgagcgtcaatctgcttggcgtagggttgtctgccttgctatcggtgctggtatcagcacccctggtatgtcatcaagtcttgcttattttgattcatataggagggaaaggttgcctgctaatttggtgcaggctcaaagagattattttggagcccatacctatgagagaattgatattcctggtgctttccataccgagtggttcaaactcgctaaatccaagatctaaggcggagattgatttgtggtcactctcttaattatttactctaataatcagcttgtggctgccacatttgagttatgcattttattcaatgatttttcctcgtgccg

SEQ ID NO: 376 - protein, 483 aa, Spinacia oleracea
MAPPTRIGLAGLAVMGQNLALNIAEKGFPISVYNRTTSKVDETVERAKQEGNLPLYGFHDPESFVNSIQKPRVIIMLVKAGAPVDATIKTLSAYLEKGDCIIDGGNEWYENTERREKAMEEKGLLYLGMGVSGGEEGARNGPSMMPGGSFDAYKNIEDILTKVAAQVDSGPCVTYIGKGGSGNFVKMIHNGIEYGDMQLIAEAYDVLKSVGKLSNEELKEVFAEWNRGELLSFLIEITADIFGIKDDKGEGYLVDKVLDKTGMKGTGKWTVQQAAELSVAAPTIASSLDSRFLSGLKDERVEAAKVFKAGGVEDTLSDQVVDKKKLIDDVRQALYAAKICSYAQGMNLIRAKSVEKEWDLKLGELARIWKGGCIIRAMFLDRIKKAYDRNPNLSNLLIDPEFSKEMIERQSAWRRVVCLAIGAGISTPGMSSSLAYFDSYRRERLPANLVQAQRDYFGAHTYERIDIPGAFHTEWFKLAKSKI

SEQ ID NO: 377 - DNA, 1836 bp, Solanum tuberosum
ccccaccaaacatttctcctttttcactatatattcatcttcttcactccattgtcaagaatctcttcctttttctcctaaaattcactttttcttcattcaccatggaaggcgcagcaactgctcaagctttatctcgtattgggttagctggtcttgctgttatgggtcagaatttagccttaaacatagctgaaaaagggtttcctatatctgtttacaatagaaccacttcgaaagtagatgaaaccctagatcgtgctcagaatgaaggacaacttccgttgattggacagtacaatcctcgtgattttgtgttgtcaattcaacgacccagatctgttatcattcttgttaaagctgggtcacctgttgatcaaacgattgctgcgctttctgagtatatggagcctggggatacgattattgatgggggtaatgagtggtatgagaatactgaaaggaggattgatgaggcgtcgtcgaaggggcttttgtatttgggtatgggtgtttctggtggtgaagaaggggcgaggaatgggccttcgcttatgcctggtgggtcttatggggcttatacgaatattagagatattcttgagaaggttgcagctcaagttgaggatgggccgtgtgttacttatattggtgaaggtgggtcggggaattttgtgaaaatggtgcataatggaattgaatatggtgatatgcagttgatttcggaagcttatgatgtgttgaagaatgcaggtgggttgagtaattctgaattggctgatatttttgctgaatggaaccgtggggaattggagagttttttggttgaaattacagcggatatattcaatgtgaaggatgaattaactggaaatggggagttagtggataagattttggataagacaggaatgaagggaacggggaaatggactgtgcagcaggcggcggagctgtctattgcagctccgacgattgctgcttcgttagacagtaggtacatgagtggattgaaggatgagagggaagaagcctcagaaattttcaggaaggaagggttaaaggaggaaataagttctgatattaatggtagcagtcttgataagaagagattgattgatgatgtgaggcaggcattgtatgcgtcgaaaatctgtagttatgctcaggggatgaatttgctaagggcaaagagctctgagaaagggtggaatttgaatttgggagagttggcaaggatttggaaaggtggttgtattatcagggcagtgtttttggatcgtattaagaaggcgtatcagaggaatcctaatttggctaacttgatggttgacccggagtttgcaagggagatggtgcagaggcaagcagcttggaggagagtggtgggacttgctgttcagaagggaattagtgttcctggaatgtctgctagtcttcagtatttcgacacctacaggcgttctaggcttcccgcgaaccttgtgcaggctcagagggactatttcggggcacatacttatgagagagttgacaagtcaggagcataccataccgagtgggcaaaacttgctaggaaagcccgagtgtaatgctgctgcagctattgcggattatgatcaaaatctctggtattagttgcgctttgtcaactgtttgattttaaaattgtgcaattcaggcatttaaaattccaatgtatcttgttgagagtttatatttgctaggcataagaaagattggtaagctttttcatttagtcttgcaggttcataatgtgtatgccttttaaccattctaggggccttgggtatttaaaatgaactctttcattga

SEQ ID NO: 378 - protein, 495 aa, Solanum tuberosum
MEGAATAQALSRIGLAGLAVMGQNLALNIAEKGFPISVYNRTTSKVDETLDRAQNEGQLPLIGQYNPRDFVLSIQRPRSVIILVKAGSPVDQTIAALSEYMEPGDTIIDGGNEWYENTERRIDEASSKGLLYLGMGVSGGEEGARNGPSLMPGGSYGAYTNIRDILEKVAAQVEDGPCVTYIGEGGSGNFVKMVHNGIEYGDMQLISEAYDVLKNAGGLSNSELADIFAEWNRGELESFLVEITADIFNVKDELTGNGELVDKILDKTGMKGTGKWTVQQAAELSIAAPTIAASLDSRYMSGLKDEREEASEIFRKEGLKEEISSDINGSSLDKKRLIDDVRQALYASKICSYAQGMNLLRAKSSEKGWNLNLGELARIWKGGCIIRAVFLDRIKKAYQRNPNLANLMVDPEFAREMVQRQAAWRRVVGLAVQKGISVPGMSASLQYFDTYRRSRLPANLVQAQRDYFGAHTYERVDKSGAYHTEWAKLARKARV

SEQ ID NO: 379 - DNA, 1473 bp, Thalassiosira pseudonana
atgtccaacgacgtcggtctatacggtctcgccgtaatgggtcaaaactttgccctaaacatggccagcaaaggattcaaggtctgcgtgggcaaccgctcaccctccaaggtggaactcaccgtcaaccgcgccaaagaggagggcaacttgcccttggtggggagttcggatcccgaggacttttgcaaacagctgtccaaacctcgcaagatcatcatcttggtgatggctgggaagccagtggatgatacgatcgctacgctctcgcagtacttggaggagggcgatgtgattgtcgatggagggaacgagtggtttcagaacacgcttcgtaggtcaaaggagctggagcccaagggaattcactttgtgggtatgggaatctcgggaggggaggagggggctaggaacggcccatctctcatgccgggtggccctcgagctgcgtacgatttgattgagccaatcattaccaagtgtgctgctcaagcgaacgacggtccttgcactggttatgttggccctgtgggagctggaaactacgtgaagatgattcacaatggtatcgagtatggtgatatgcagttgattgctgagatttacgacatcatgcgcaatgtgctcaagatgtcaaacgaggagatggctgcagcgtttgctgattggaacactggcgagttggagagctatttgattgaaatcacctccaagattctcaacaagaaggatgatgtgactggggaaggatatgtcgtggattacgtcttggataagacgggtatgaagggtacgggaaggtggacgatccaggaggctgctgaaagatctgtagccgcacctacgatggcggcgtcgctcgatgctcgttacatctctgctcgtaaagacgaacgtgtcaaagcgtctcacatcctcaaaggtcctgaaatgacttcggccgagatccctgtgcacaaggggcagatgttggatgatctcaaagcggctctctatgcagccaaagtctgttcttatgctcagggactcggcatcatcaagtcctgctcagatgatatgagttgggatatcaatctttcggactgtgctcgtatgtggaaaggagggtgcattattcgtgcagcactgcttcaaaagattcaggatgcattggcaagggataagaatctgccaaacctcatccttgatccagtcattgcaggagagttgaacgaacgcacggctgcatggcgtagagttattgtggttgccattggatatggtgtttcaactcctgcattggctggttccttgaactactttgattcttaccgaagagagtctcttcctgctaatttaacgcagtcgcagagggacttctttggagggcacacgtatgagagaacggatagggatggtgtgtttcacacggcttggacggatgctcacaaaagtatcggtgatatctcagaaagaaaggctggtgaggtgtaa

SEQ ID NO: 380 - protein, 490 aa, Thalassiosira pseudonana
MSNDVGLYGLAVMGQNFALNMASKGFKVCVGNRSPSKVELTVNRAKEEGNLPLVGSSDPEDFCKQLSKPRKIIILVMAGKPVDDTIATLSQYLEEGDVIVDGGNEWFQNTLRRSKELEPKGIHFVGMGISGGEEGARNGPSLMPGGPRAAYDLIEPIITKCAAQANDGPCTGYVGPVGAGNYVKMIHNGIEYGDMQLIAEIYDIMRNVLKMSNEEMAAAFADWNTGELESYLIEITSKILNKKDDVTGEGYVVDYVLDKTGMKGTGRWTIQEAAERSVAAPTMAASLDARYISARKDERVKASHILKGPEMTSAEIPVHKGQMLDDLKAALYAAKVCSYAQGLGIIKSCSDDMSWDINLSDCARMWKGGCIIRAALLQKIQDALARDKNLPNLILDPVIAGELNERTAAWRRVIVVAIGYGVSTPALAGSLNYFDSYRRESLPANLTQSQRDFFGGHTYERTDRDGVFHTAWTDAHKSIGDISERKAGEV

SEQ ID NO: 381 - DNA, 1762 bp, Volvox carteri
aggtcttgctcgctagctttctgctcttcaatcgctgtgattggtcacgaaaacccttaagatgaacgctaacatcctcaagagcagcaagcttcagcaaacaggtggtcgtatccgggaagttcctcttacaaacacggcgttccgaagtgtggcgccgttccacgtcccttggaccgccgtccctgccgtcctgctgctaccgagaccagcccccttcgtgcgtcgtgtggtccctcatgccgcatctactgcggaggccccgcgcgccagcgacaaaagttccccaatggcggtgtccgagatcggtctcgtcggtctggctgtaatgggccagaacatggccctcaacgttgccgagaaaggcttcccgatttcggtgtacaatcgcagttatgacaaaaccgaggccgctgtgaagcgtgcgcaaaaagagggcctcggcgacaaactgcgtggctatgagtcagtgaaggatttcgtggcgagtctgcagaagccaaggcgtgtcattatccttgtcaaggccggcgcaccggtcgaccagacaatcgatgcgctctgcgagtacatggagccgggtgatattattatcgatggtggcaatgaatggtacgaaaatacggagaagcgcgtggccaaggtggcgtcgaagggtattctgtacatgggcatgggcgtctctggcggcgaggagggcgctcgccggggcccctccatgatgcccgggggtagtcccgaggcgtacacccacatcaagtcaatcgtggagaaggtggcggcacaggttgacgacggcccctgcgttatgtacattggcggcggcggtgcgggtaacttcgttaagatggttcacaacggtattgagtacggcgatatgcagctcatcagcgaggcgtacgacgtgttgaaaacacttggtggtctcgataatgaggagctggcggcggtgttcaaggaatggaaccagggtgagctcaagtccttccttgtggagatcagcgccatcattatgaacaagccggacgaccaggcccccggctacctggtggacaagattgtggaccagacgggatccaagggcacgggcaagtggaccgtacaacaggcagctgagctggcagtggcagcgcccaccatggcatcagctctggacgcgcgctacctcagtgcgctgaaggccgagcgcgtggcggcatccaaggtgttcgcctcgtgcgcccagccgggtgctgtgccccgagtggataaggcccagcttgtggcggacgtgcgggcggcgctgtatgctagcaagatttgctcgtacgcccagggcatgaacatcatcaaggccaagtccgtggagaagaactggaacatcgacctggggggtctggcaaggatctggaaaggcggctgcatcattcgcgcccagttcctggaccgcatccgtcaggcctacgagcgcaactcggagctgccctcgctgctggtggaccccgagttcgctaaggagctggcggccgcggagggagcgtggaggcgggtggcggcgctggccgtcacacacggtgtgcccatcccgtcaatgacgtcatccctctcgtactttgacacgtaccggagggagaagctgcctgccaacctggttcaggctcagcgagacttcttcggctcgcacacctaccagcgcttcgacaaggagggctggtaccacacggtctgggacgagacgtttggctcggcggactccatcaccaccagcggctacgtcgtgtga

SEQ ID NO: 382 - protein, 566 aa, Volvox carteri
MNANILKSSKLQQTGGRIREVPLTNTAFRSVAPFHVPWTAVPAVLLLPRPAPFVRRVVPHAASTAEAPRASDKSSPMAVSEIGLVGLAVMGQNMALNVAEKGFPISVYNRSYDKTEAAVKRAQKEGLGDKLRGYESVKDFVASLQKPRRVIILVKAGAPVDQTIDALCEYMEPGDIIIDGGNEWYENTEKRVAKVASKGILYMGMGVSGGEEGARRGPSMMPGGSPEAYTHIKSIVEKVAAQVDDGPCVMYIGGGGAGNFVKMVHNGIEYGDMQLISEAYDVLKTLGGLDNEELAAVFKEWNQGELKSFLVEISAIIMNKPDDQAPGYLVDKIVDQTGSKGTGKWTVQQAAELAVAAPTMASALDARYLSALKAERVAASKVFASCAQPGAVPRVDKAQLVADVRAALYASKICSYAQGMNIIKAKSVEKNWNIDLGGLARIWKGGCIIRAQFLDRIRQAYERNSELPSLLVDPEFAKELAAAEGAWRRVAALAVTHGVPIPSMTSSLSYFDTYRREKLPANLVQAQRDFFGSHTYQRFDKEGWYHTVWDETFGSADSITTSGYVV

SEQ ID NO: 383 - DNA, 2092 bp, Vitis vinifera
gccaactttgacccgccttgtgtgcagccttagaaatacataggggtgagcctctcaccctttttgaaccaaaccgttggtgttcttcaaaacccagatctccattttttctgggtctgtctcactttcaagctatcgtcatttgttcgcactttcagaggaaaaagtaatggctcctgtatcaagaattggcctttctggccttgcagtcatgggtcaaaatcttgccctcaacattgctgagaaaggattcccaatttctgtttacaaccgaaccacctcaaaagtcgatgaaaccgttgaacgagccaaacaggaaggaaaccttcccttatatggcttccatgatcctgaatcctttgttaattcaatccaaaagccccgtgtcataatcatgcttgttaaggctggggctccagttgaccagaccatcaaaaccctgtccggttacttggagaaaggagactgtatcattgatggtggcaatgagtggtatgagaacacggagaggagagagaaagccatggctgaactgggtctgctctatcttggcatgggagtttcaggtggtgaagagggtgctcgtcatgggccatctttgatgcctggaggttcatttgaggcttacaagtacatagaagatatccttcttaaagtggctgctcaagttcctgatagtggcccctgtgtgacttacattggcaaagggggttctggaaatttcgttaagatggttcacaatggtattgaatatggtgatatgcagctgattgcagaggcctatgatgtgcttaaatcagttggtaagctctccaatgaggaattgcgtaatgttttctcggagtggaacaagggggagcttttgagcttcttgattgagattactgcagatatcttcagtattaaggatgataagggagacggatttttggtagacaaggttttggacaaaactggcatgaaagggactggtaaatggacagttcagcaagctgctgacctatcagttgcagccccaactatagcatcctctttggatgcaaggttcctcagtgggctgaaggaagagcgtgttgaagctgccaaagttttcaaatcaagtggttttgaaaatgtcttgtctgaccagactgtggacaagaagaagttgatagatgatgtgaggcaggcactttatgcatccaaaatttgtagttatgcgcaaggaatgaatcttatccgggcaaagagcattgagaagggatgggatttgaaactgggtgagcttgccaggatttggaagggaggttgcattattcgtgcaatatttttggaccgtatcaagaaggcctatgataggaatgcagatcttgctaaccttcttgtggatccagagtttgcaaaggagatagttgagcgacagtctgcctggcgaagggttgtttgccttgccatcaactcaggcattagcactccgggtatgtcttctagtcttgcttactttgattcctacaggagggacaggctgcctgctaatttggtccaagctcaaagagattattttggagctcatacctatgagaggattgatacaacaggatctttccataccgaatggttcaagattgctcagcaatctaagatttgatgtgagcttcctgttggggttcccctacctaattgagcaattatcattaaacctaataatatggaagaattaggacagtttgctctgctaccatgcagtattagcggttctctagtattagttctattgagtttgttaaactattattggcctttttttttcttttcttttttattttgtgtttgtgtggagatttattgctggtctagcaggccgtgtcattctacattggaggatccactccttaataatcttattcccttataaaaataagaacatgtatgtttcccatcccagggaagataaatactgttccatgtggtgcttcttgaaggatgaattactagactagcattttcattttcctagttttggcactcctttctttgaattgtattttgtcctgcagtttcaatgcctaatggtcatcaataatggtaattctgtgttctgttttaaaaaaaa

SEQ ID NO: 384 - protein, 485 aa, Vitis vinifera
MAPVSRIGLSGLAVMGQNLALNIAEKGFPISVYNRTTSKVDETVERAKQEGNLPLYGFHDPESFVNSIQKPRVIIMLVKAGAPVDQTIKTLSGYLEKGDCIIDGGNEWYENTERREKAMAELGLLYLGMGVSGGEEGARHGPSLMPGGSFEAYKYIEDILLKVAAQVPDSGPCVTYIGKGGSGNFVKMVHNGIEYGDMQLIAEAYDVLKSVGKLSNEELRNVFSEWNKGELLSFLIEITADIFSIKDDKGDGFLVDKVLDKTGMKGTGKWTVQQAADLSVAAPTIASSLDARFLSGLKEERVEAAKVFKSSGFENVLSDQTVDKKKLIDDVRQALYASKICSYAQGMNLIRAKSIEKGWDLKLGELARIWKGGCIIRAIFLDRIKKAYDRNADLANLLVDPEFAKEIVERQSAWRRVVCLAINSGISTPGMSSSLAYFDSYRRDRLPANLVQAQRDYFGAHTYERIDTTGSFHTEWFKIAQQSKI

SEQ ID NO: 385 - DNA, 1943 bp, Zea mays
gtgcagccctgcagacttgggatttggccattgggaaggggcaggtagtaacgtaggctggcgctgcagatcaaaaggctctcgcctcggcttggcagtcggcactccctctccaccgcgctgcaggggcgacgcaaggccgagcgctcctcgatccagatccaaggtaggagatggctctcacgagaattggcctcgccggcctcgcggtcatgggacagaaccttgccctcaacatcgcggagaaagggttccccatctcggtctacaacaggacaacctccaaggttgatgagaccgtgcagcgtgccaaggtcgaaggaaacctcccagtgtttggtttccacgaccccgcgtccttcgtgagctccatccagaagccccgtgtcgtcatcatgctcgtcaaggctggggcgccggtggaccagaccattgccacgctcgcggcgcaccttgatcagggggactgtatcgtcgatggtggcaacgagtggtacgagaacacggagaggagggagaaggcgatggaggagcgcgggctcctatatcttggcatgggcgtctccggaggagaggagggtgcccgcaatggcccgtccttgatgcccgggggctccttcgaggcatacaagtacattgaagatattcttctcaaggtggctgctcaggtacctgacagcggcccgtgcgtcacatatattggcaaaggtggatcaggcaacttcgtcaagatggttcacaatggaattgaatatggtgacatgcaacttatcgccgaggcttatgatgttctcaagtcggtgggtaagctcacaaacagcgagctgcatcaggtgttctctgagtggaacaagggtgagctcctcagtttcttgattgagatcacggccgacatctttggtatcaaggatgacaagggtgaaggctacctggtcgacaaggtcctggacaagaccgggatgaagggaactgggaaatggacagtccagcaggctgctgagctttctgtagctgctcctacaatcgaggcgtccttggactccaggttcctcagcggtctgaaggacgagcgcgttgaggcttccaaaatcttccaaggtgactactccactggcctaccggtggacaaggcacagctgatcgaggacgtgaggcaagctctatatgcctccaagatctgcagttacgcgcagggcatgaacatcatcaaggccaagagctcagagaaaggatggggcctcaaccttggtgagctagcgaggatctggaagggagggtgcatcatccgtgccatcttcctcgaccgcatcaagaaggcgtacgataggaaccctaaccttgccaacctcctcgttgaccccgagttcgcccaggagatcatagacaggcaagctgcctggcgcagggttgtctgccttgccatcaacaatggcgttagcaccccaggcatgtctgcaagtctggcctacttcgactcgtaccgcagggataggcttcccgccaacctggtgcaggctcagagagactacttcggcgctcacacgtacgagagggttgacatgcctggttctttccacaccgagtggttcaagattgcgcgcaactccaagatctgaacatggcctcgtgtttgcatatgccagtatgccaccgtgtcgagtaatcaatcatattactgcttgcagggaggaactgtgtttgatttttattttccatgcgcaatgcttaatttaggtcaggaagtccaaagtctctcccattgttttcctgtaagagctaagcagtaccagatggagaaccttatatttgctggaacatgaataaaagcatttgacatgcttgtgtttagttttctgtcggccatgcattatattttcctttccccttgacagaaattttttcctgtacggaagtgtgggctattagtattaatttttccagtc

SEQ ID NO: 386 - protein, 480 aa, Zea mays
MALTRIGLAGLAVMGQNLALNIAEKGFPISVYNRTTSKVDETVQRAKVEGNLPVFGFHDPASFVSSIQKPRVVIMLVKAGAPVDQTIATLAAHLDQGDCIVDGGNEWYENTERREKAMEERGLLYLGMGVSGGEEGARNGPSLMPGGSFEAYKYIEDILLKVAAQVPDSGPCVTYIGKGGSGNFVKMVHNGIEYGDMQLIAEAYDVLKSVGKLTNSELHQVFSEWNKGELLSFLIEITADIFGIKDDKGEGYLVDKVLDKTGMKGTGKWTVQQAAELSVAAPTIEASLDSRFLSGLKDERVEASKIFQGDYSTGLPVDKAQLIEDVRQALYASKICSYAQGMNIIKAKSSEKGWGLNLGELARIWKGGCIIRAIFLDRIKKAYDRNPNLANLLVDPEFAQEIIDRQAAWRRVVCLAINNGVSTPGMSASLAYFDSYRRDRLPANLVQAQRDYFGAHTYERVDMPGSFHTEWFKIARNSKI
